United States Patent Application Publication US 2025/0295137 A1 - sequence listing, part 6

SEQ ID NO: 6 - DNA, 1866412 bp, Latilactobacillus curvatus
  source 1..1866412: mol_type = genomic DNA
atgttttagaatatttggtcaatataaaaacccccgatattggattttggtccaatatcgggggttcacttcatgatcgtcttttttaattgattaaattgattaaactgaataattaattaatcactaccactatttttgaccttcaggtttcaaatcaaagcgatgtgaaacaattccgtataaaatccaacctgcaaatgttactaatgaaccatatgcaagttctctgaagccaaccgcatacaatgcgtacaagctataaatagcagcaaccattgcaattgcatttgttatcttcatcgatttaggtgatactttggcatctaattgcattgtctttaatgctcccatcgagagaagatatggaataacattcgtaacaaccgctaagtttaccaataccgtaaattgttttgaaagtgatggactaatcgtcattaatgataataaagattgtaaagttgtaataatgaccatcccaacgattggtgtgccattaccaactacttttccaaatactttagggaaatagccttcaacagctgaactgcggaacacttcggcaatcgtaaattgccaacctagtaatgaaccaaaacaagaaataaccattaaggcaagtacaatactcccaattgttgggttaaacatttgactaaatgcaaccccaaatggcgcatttgatgctgccaaaacactgtttggtacaatcccttgcatgatgtttgttgaaataatatacataattgcagcaccaattgtcccacctaaaacggcaattggaacatttttcttaggattttcaacagaatccatattagctgatgcggattccaatcctaagaacgcccataatgtaattgaaattgatttactaatcccattaaagaaacttaaatgatgtggattccaagcattagcgtacattgtgccactaaagaagaaccaaccaccaattgaaatcacaacaactggaataataacaccccagactgtaaatgaactaatcttaccagtaattttagcaccaccaaagttaagtacagttgctaaccagagtgtaataattgttccaatcgctacctcaactgggctcaaatgccaatggaacaacactgcagcgtaaccaacagctgaaattgcaatggcagcattcgcaattactaacgaaacaccatatgtgtagtttgccatgaatgaaccggctttaccatatgagtattcagcataaccgcccataccacctgatttcttagtgtacataccagcccgtgaaaaggcgtatgccaagcacatcgcccctgttgctgttaccacccaagataaaatagacattgtcccgacttgcgctaaattagttggcaacataattatcccagaacccatcatattgatggcagtgataattgttaactgtataacactcatttttttcccatcttttgccatttaactcacctcatcataaaaataaacgtagtgtacatcagaatgtgcactacgtttaaagtttgtttgatcattatttatctaatacataaccaaatgcagtagtataaccatcaatatcttcaaaatagacaccttgtatttctggtgcaaatccagggaacttgttaatcccttcttcaagaatcaagaagtatttttgagctacttctgaccatctttcaccaggaacaacacagaaaatacctggtgggtaaggaagtgccccttcaagtgcaatttctccctgaatgtcctttaatgcgactaacttagcgttattccgcaataattcaacgtttgcatcatatggtttcattgcttgttctgggaagtgttctgctaagaacatcttcttctgatagtcctttgcattattttctttatagaaatcatgcaattcttgacacaattgacggattgtataaccattatatctttctttatgtgcttcatataacgaaggtaatacatcttttaatggtgcatctgctttaactagggcttcaaacttaataatttgtgaaactaaattatccatcttagctgatgtttcagcaggtgtcatcaagaatagaattgagtttaaatcattcttttcaggaataataccatgttcacgtaaataattggcaagaatggttgcaggaataccaaaatcttcgtattcaccggtttcaacatcaatccctggtgttgttaacataaatttgtttggatcaatgaaatattgattattttcatagccatcaaatgcatgccattttgcacctttttcaaaacgccagtagtcgatattattgacgatttcttcagtatcagcatcttcccatttcttaccgtttaccattggtggtaagaaaggtttaatcatcgatgcattctttaacaaactcttccgcgcgttaacggaaacaaccaaagcatcatgccataatcgcttaccagcttcgccatcttgcatcttcgcattaacatccaatgttgcaaacaatggatagaatggtgaagttgacgcatattgcatgtaagcattattgaagcgtttgtggttgatatatctcttttgacccttgatatgtgaatcttttttatgaatttgtgatgcttgtgaaaatcccgcttgttgtttatgtgttgattgtgttactaagatacctggatcttcaggtcctaagtctagtaataatggtgatgaatcacgcatcattggaataaattgttcataaccaacccaagctgagtcaaagaggatatagtcacaaagatgaccaatcttttcaacaacttgttttgcattataaattgttccatcataagttcctaattgaataacagctaaacggaatggtcgtttagctttagctttttcaggatcaactttagcgatttgttggcgaatgtagtcttcatcgaaatctttagcgtaaataccaccaataaagccataaggatcacgtgatgtttcaagataaactggacgcccaccatctttaactaaggctgcattatagattgatttgtgattatttcggtcaaataatactaaatcaccgggcgcaattgcagaagtgatcgcaatattatttgaagttgttgtcccgttcattacaaaatatgtcttgtctgcattaaatactttggcagcatgtttttgtgcatccattgcgggcccttcatggattaataagtcacccaaatcaacatccgcattacaaatgtccgctctaaaaatattttcgccaaagaagtcgtataactgtcttccggctggatgtttacggaaatattgaccaccttgatgtcctggacaatcaaattgaatgttgccacgatcaacatatgctgttaattctttaaagaaaggtggtaaaacaccttcttcatatttagtagcagcagcttcaatttctctattagcaagtctgtaatcgtattcatttttcgtatcaatgatatggaaaatttttgccattacatcctttccgattgttgaactgttatcagtaacaataaaaattgggatatcaaattttgtatcatcaacagttgttacatattgcaaatcagtatctgataaaacaacagctgcgacatccacaaaatcggtattctcaactaatacggtttgccgatccgttgaaaaaaattggtttaaatcagcggaaacagcaattttcatttttgtcatgtctgtaccctcccaaatctctactttgttaaataactaacacttatgttttaacactaatgtaaaagtactgcaagggcgttttgtgagcgctttctattttcgcgatgtatacatattaaaatgaatgcttactgtcaataacttacactaccattatttttatctaatagccgccattccggacattaactctctaagaaaaaggagaaaaaataaaaagtttaataaatatattatttttatacatttattaaacttttatatttttttattttcattttaaaccagctattttcattagttgctttctaaaataattcatgctattttaattcattcagtcagccaatctcgaaaataccattcttcaattctatttccactcggaaataagacataatagcaagacccactgaaattagttcaattattggtaaacttgcccagacaccgctcattccgaagcaaagcgcactgattgttaatacaactgctactaatagatagccacgtacaaaaactaatgcaagtgaaatgcgtgtcttattaattgatgcaaagaatatattcaaaaccacgtttatccccgagaaaaagatacttaagaaatagattggcatcccgtcactggcaattttaatcacttgcgcattattttccgtattaaatacgccaataatctgcgcgccaaattggaagacaataaagtatgcaactatcccaatcactaatgcgcaagctacgccatatttcaatacaaacttaatttttggtaatgcatgctctgaataggagcgacttacaagtggttggattccctgagcaacacccgtaaaaatggcaagcaccactaataaaatattagtagcaatcccgtatgctgcaacacccatattgccactaatatgcaagataaccaagttaaatacaaaaataccaatcccattgctcatctctgttaaaaacgagggtaagccaatttgaattgcactactaataattttaaaatcaaatccataccagccgattgttaaatgattatcttgcctaaaaaagtgactaagaataatcaaaatactaatcattggagataaacttgttgctagtcccgcaccgaccattcctaattttaaaacaagtattaatagccaatcgagtaaaatattagtcaagctagagataatcatcgctaccatggctatcatggtcccccgatcattccgaacgaacgataatattaaattattaaatacaaaaaaaggaccacaaattagtatgattctgacataacttaatgtatgttgccaagtctctccatctgctcccaatatcccagttattttcgacgcaaaaagtagtccgcacatcgagaaaaaagcgcccaataatagcccaatataaaacatttgcgtaaagacacgattggcaatctttggattgctaattttatagatggtaaaaattgtcgcgccacccattccaagtagtaatcctaaaccttccatcaagttaaaaagcggcatcgttaagttcataacggtgacccccagaacaccaattcctttagcgacgaagaaagaatccgctaaaacataaatcgacatccccactgcacttataatcgctctatagacatattgattgagttcagccaataagccttttcgcctatccatactatcctacgacctctccaaaatagttgatcactactcccattataccacggtattggattagcctattttacggatcatatgttcatattgatgattaccaatcatcaattccccaacgacttgataacccattttttcgtataattttttggcacctggattattaaaatctacatttaaactaataatctgtttgtgattagccttggcaactgattcacatgctgccaatagcttagatccgacacccttaccacgtgcttgtggaacaacggcaattgtatcaatatgccattcacctggctgtgcctccttatcattaaagaaacgcgttgtttcaggtaagccaatttgtggaaacaacggtgcaagggcatcatcaatatgagcctctttttcctcaggaaagctaacaagtatgcccaaaatctgaccatcctcttcataaactagtgtgttagcataactataccgatattcaggcattgcaaaggcctgttctaaaatgctaaacaaatcctctagcggaatcttttggaagagtggcatttccatttcttcaaaaacaacattaataattggcaagacactcttgtcatctgcaactgttgcttgacgaatcattcaaaaacctcctctagtaatctttttatcatacgggggattgcatagcacgtcaactgttatcatactaaatcagatcggtaatcggccattttcttagcaaataactcaccattggtcggtggcgtgtacgtcaatgcattcgcacccgcttcaatcgtcgctaatatactagcttcgtttttacccccagttgccataatcggaatttcgggatattgttggcgaattgcactaacaattgctggggttttagccgcgccactaacgtttaaaattgaaactccagcttcaatctgcgcggcataatcctgtcgttctgacacaacagtacaaataatcggaacgtcaacaacgcggttaatcattttaatcgtctccaccgaggtcggtgcgttaaccaccacgccaatcgaaccggcggcctctgccaataatcccatgtacgcggaccggctgccggccgttaagcccccaccaatcccattaaaaacggggatcgtcgccacattgctgatggcattcatgacagctgggtgtggtgtaaatggataaactgccaaaacagcgtcagcatttgtattattcacaatcgcaacatcggtggtaaaaataattgttttaatcttcttaccgaggatcttaatccccccaacttgtcgcgccacagcaggtggtccgacaacactggtttttaatggtgtataaatctctggtacgaattgctctgtcatccgaatccccctctttattctgttgctttaataatggctactaatcgttgttctagcgcgaccaaatcaattgcatttaatcgcgcaaaattgatgcgcaacgcatctgttttaagcccaaataatgatcctggtgcgacagcaagctgatgatcaataaaggtttttaagcgtaatttatggttcggatgggtcacccaaatataataacctcccgctggtaagtaaacgtgccaatcgggtaataccctttcaagcatcttataggttgcttgtgcacgttcttgaagcgtccccttaagttgatccaactgcgtttgaaattgcggatcccccatcgctaaggtcaccatgacttgcgccataatgcttggcactaaatccatttcatgttgcacgcgggtcaactgttcgatgacttgcggagtagcagctacccacccgattcggctactagcccccataattttggacaacgaactaatataaataacattatccggatcaagttgctttaacgttgggattggcctagttgtatcaaatcctaaccaaccaaagacatcatcttctacgattggtatttgatgcatctggcataaatgaacaactgcttttcttttttgaaaactcattacgtgccccgttggattttgataatctggattgagaataaccaacttaacacggtgcttaatgattagctcttctaaatcagtcaaataaatcccatcagcatcaactgaagcttcatagacacggacacccgtcgcttcaaacaaagttgagtcatgaaaaaaggagggtgattcaattgcaacagcatcacctggcgtcaataaaccctgtaatattaaaaagagtgattgttgcacaccggcagtcattaataactgctcttcggtaaaaaatagccgtttattgtgttgatccaattgattaattgccgtaataagtggttgatagcctcgtggtgtctctaatgcttgtgcagtaataaaatcttgccacgtcaatgcaggaaattgaaattgtgggactaattctaatggtaagtcacttgaataaacatcaattaacttttcaggttttcgtctaatcagttgttgtaattggcgccgttcattttgactttgtgactgacgttggctgatcaaataagtatgccaattgacccgccttgcctgtggtcgcgcttgctggctgacaaacgtcccgctaccaacgcgacgttcaatcacgccatctgcaaccaattcatcagacgcacgtgtcaccgttgaacgattgacactcaataatttagctaactgacgctctggcggtaattggtcacctgaacttaattgtcctttatctatcaagctaataatcatttttttaattgccatatactttggcttttgttcaggtaaatattgtaaccattcaatcatttttaacacctcttatttagtttacaaattggatggtaaaaaaacaagccaattggctgttgttgaacattctattcttctctatgatagtcaagaatagaattttggaggacaactatgcaaaacattctaaccattgccggctctgatactctgggtggtggtggcatccaggccgatttaaaaacgttcgaagccttagaaacgtttggggtcagtgccttaacttgcatcgctacattgctaccagacggtcacttgaaaatccacaacttacctgaggataccattttggaccagcttgatgccattttaaactacgtgccactaacgcacgttaaaattggtttggttcatcaaacggaaactttaaaagccatctgtgagcgactacgacagcatcctgaattaaccatcatcgctgacccggtcctcgtctttaaagaaggcgccattcttgcgcagcaagcgtacctcgacacgttaaaaaaagaactactgcctttgacgagcgttgtcaccccaaacttgttggaagcccaacaactcagtggtctttcgtcaattaccacgcgtgaggaaatggtcgaagctgctacaattatccaatcatttggccccaagcacgtcattatcaaaggtggtcaacgattccctggtgagcaggccgttgatttattaaaatcgggcgcaacaactcattatttagaagctccacgattggaaacaactaccattgatggcgccggttgtacgctttcggcagcgattgcggcggaattagcacaaggaaaatcgattgaagttgccgtggcacgcgcaaagaaatttgtttatgccggtttaaaagatggtattcatctacgccatggcctggggaatgtctggcagggggctactaaacatgcactttaataaacgtcaattaccattactcgcgatgctcaccgcattgaccgtggcactctctttgttaatcatcatcccgattccggcgacgaagggctttgtgacgctctgtgaggtcggtatttatacaacggcgatcatgctgcgaaatcctggcggactcactgtcggagccctgagtggcctattaatcgatctattatctggttaccctgagtggtgtctcttctcactcatcattcatggggggcaaggcttcgttgtaggtcacctgactcgtaatgattcaatgcgaccaaagcagctgattatccccctcatttgcggtagtatcgtcatggttgccggttactttttagctaccagtttacttttcggctgggctgccggaatcgcttcgattttcagtaatattgttcaaaatggacttggtatcgtggttaccatcccgttagtcactagtttatcccgtattcgaccacaattatttaaccactaggagattttttaaatgacaaacgaattacaattaaaccaaattcaacaagacttaacaaagatgactcaggatgttctaaacgaagcacacttaggaaatggtgatttgttcgtcctcgggtgttcaacgagtgaagtcgtcggtggtcatatcggtaaggcttctagcaaagaagtcggtgaagtcatcatcgcaacacttcgtggcattctcaatccattggggattcatttagccgtgcaaggctgtgaacatattaaccgtagtttggtgattgaacgtcaggttgcccgcgcacacgactttgaaattgtctcagttgttcctgctatgcacgctggaggcgcctgctccgtcgctgcatttgaacaattcagtgatccggttgaagttgaacatatcgttgcacaagctggattagatatcggtgatacggcgattgggatgcacgtgaaattcgttcaagtccctgtccgcccaacccttgatacattgggtagtgcacatgtcacagctttacggtcacgaccaaaatacgttggcggtcctcgagcaacatatgcaccaactcattaaacgcaaaaaaagcctcgttctttgaacgaggctttttgaatattatttattcaaccgtgacactcttagctaggtttcttggctgatctacatcataccctctatgcaaacttgcatagtaagcaattaattgaccaggaatgatccccaataatggtgtcaataagtcgtttacggttggtaaaatgatctgatcatctgcttcagcagattcttcgctgacaatcgtcaaggcttttgccccacgcgcagtcacttcttgtaagttaccacgcgtgtgcgcaatcgttttggcatccatcaagaatgcaataacgggtgtcccctcttcaatcaaagcgatggtgccatgttttaattcgccggctgcaaatccttcagcttggatgtatgaaatttcttttaacttcaaagcagcttctaaactcaaggcgtaatcttcaccacgaccaatataaaaggtattgcgtgttgtttgtaagtaatcagtcgtcaaggtttcaatctgttctttttcgctcaataaagcttccatgccagtagcgactaagcctaattcatgatgtacatcgaattgttctgctagcaccagttgattgtggcgtccaagcgcaacagccaagaataattcaactgcaatttgtgcagtgtaggctttcgttgaagcaaccgcaatttctgggcctgcatgcaataataatgtgtaatcagcttcccgtgaaagtgttgacccttggctgttagtgatggtcaagcttggataatgcaaggcattagtttgtaccaacacttggcgactatcagcagtttcgccactttgtgttaaaaagataaagaatggcttttcagataatagcggcatgtgatagccgaattcactagcaacatgtacttcgacaggcttgtgcgttaatgtttcaaacaaggtcttcccgattaaaccggcatgataacttgtcccagccgccacgatgtagaggcgatctgcatcattcattgcactgagtaacgctgagtcgattttaagctctccatcaacagcaacgtattcgttcaataaacgccgcataacagctggttgttcgtcgatttcttttaacatgtagtgtgggtatgtgcccttgcccactgcatcagcatccatttcaacatgatagctttcgcggtgaataaaagtgccgtctaaatcttcaatttgaacactttgtttcgtgagtgtcaccatttcacgatcatggatttcaataaaatcttttgtttcattcaacatcgctaatgcatccgagcacacaacgttaaagccatcacctacaccgattaacaatggcgatttattcttagcaacgtataaggtgtcaggatcatcacgatcgaccatgacaaatgcgtatgagccttcaatcaacgttaaagccttccggaaggcttccttagctgataattgttctgtcttagcaaggtaagcaatcaactgaacagcgacttccgtatcggtttgactgacaaaatggacatcctccaagtatgtttcttttaaagctaaatagttagttaacacgccgttgtgaaccaagtaaaaacgaccatcttcagaaacatgcggatgcgcattatcacgactcgcaacaccatgcgttgcccaacgcgtatgaccaacaccgattgttccttgtacttcaggcccaaccgctgcttctagaacgctaattttaccgggttctttaactaagtagtcctgcccagtttcgctgttcacgtaaatgcccgctgaatcgtaaccacgatacgccaacttctctaatccgtttaataaaatttcagttgtcttttcattgccaattacgcctacgattccacacattataaaaatcctcttttcaactttggtttaatattctttaatcaattggtacaacacttaaatataatagcaccaacgattttaatgtcaacatttttattggtatatataaatttataattttggtatagtccaaatattttccgctatctagcgcttttatgctatactaagaccagtcaattttagaaaaggagtttctgtaatgaaaaagagcatcttgttaattcgaagtatttctcttcttggcctattagtcggactgagctttatcgtcgttgcacctaaaacaatcgccttacatattgccgccaataacattgtcgattcaaccggtagtaaatacatgctactattagaacccgctttattaatcatcgtgaatgaagtcagtgttttcaatctcaaacgttaccgcaaaaattatcatttgactgatgcacctatcatacttgtcaaagaatggtatctgatatccgctgctgttgtcttattggttgtctttggttttctgatgtacgaacaagtcacattgcgttagaagaatgggctcttaaataaaattgcaccaaaaaaacccgtcaacacaatgttgacgggcttttttagtttgattcaagtgagaacgtgcttttcaagctagtgctcaaaagttgaccaacttgaacgcgcttctcgagtagtcatttccggtgaactgcaaaatggggattatggcaagaaacaccataacccccattttactgttaatcctcaaagcctaaccaactcgcgtcagcactccctttaattatgcaccaatttcagctttaacaaccgctgcgatttgatcagcatattgatttactttttcttctgttgcagcttcacacattactcgtagcaatggttctgtcccacttggacgaaccaagacgcggccatcaccattcatttctttttcaacggtatcaatggcagcttggatcttgtcatttgttaaccaagcatccttgtccttaactgttaagttaacgagtttttgtgggtaagtttgaacaggggctgctaattcagataacttcttaccagtttgtttcatgacgtttaagagttgaatcccggttaacatcccatcacctgtattgtggtaatcaaagatgatgatgtgtcctgattgttcgccaccaaggttatagcctttttcacgcatttcttcaacgacgtgacgatccccaacgtctgtttggactgattgcatgttgttggcttcaatcgctttatacaagccgatattactcataacagttgtgacaatcgtatcttgttttaaacgacccttatcagataaatattgaccgagaatgaacataatcttgtccccatcaataatattacctaattcgtcaactgcgatacaccgatccccgtcaccatcaaatgctagtccaacttgtgcgcctgtttcaagcactcttttagcaacattttctgggtgtgttgaaccgacaccatcgttgatattcaaaccatctggatgggttgccgttgttgtaaattctgtttctagatcagcaaatacgcggctaattaaaccactggttgaaccgtttgcgccatccaatgccactttaatcccagctaaatcatcaggaatcgtgtgttctaagaattgggtatacttcaaagcaccttctggatattcttccaccgtccccagaccagcgccttctggacgtggtaaagtatcttcttcggcatcaataattgcttcaatttcttcttcagttgcgtctggtaatttgtaaccatctgcgccgaagaatttaatcccattatagatagcggggttatgtgaggctgaaatcataatgccggcacttgcttcttgaaccttaattaaataggcaaccgcaggtgttgtcaccacgcctaatgataagacttcaatcccaactgataataagccggaaatcaaagattgttctaacatttggcctgaaatacgtgtgtcacgagccaccaaaacctttggccgttgatccttatcagcgtgcttggtcaaaacgtaaccacccgcacgtcctaatttaaaagccatttctgggcttaattctaagttggcaacgccacggacaccatcagttccaaaatactttgtcatatttaattatctccattcatcctgctaaaatctttagcgttgattattgatttacatcggtatttgctttactactttcacttgagcttgattgactacttgattggctgttacttgaacttgactcaacgagcgcactacttgatgtttgtgccgtactttcagacggcgcttcaacagtattagtagcactcgtattggtcgtatctggagtcaccgtaattgtcaccttaatggcacttggcgtactctcataaatgttgtctggtaaagccactttaaccgtctttgaagttgaactcgtgattgacgataaatcgacactcactggtaacgacgtcaacttggctaaagctgtttgacgaccatacacggtcactgaatcagttgttgatgacagactgtagctgtagccacttttttcaccggtcttttccaaactaatcgggagtgttttcttactcatttgaaccaatatcttaacgttaacggtttgtggtgaaattaaaacatttaacgctttcccattgcgatcaacagcttgcaacaagacttcttcattgatgtcttttttggtgccttcatcgggatcaacagtggctactacttgcgacacagcattcactgctgattttgcaccactgacttcaaccacgtcttgacttagttttggatttcctagactatacccggccgctaagttttctttcttaacattgacctgcacagggaattgctttgtcactttgtgctcaatgtggaccttaatttctttaggttcaatcgtgactttgatatctttattaatccccgtctgttttaacttgacggtgtgatcaccaggacccagcttcgttaaatcgccaatcacgcggaaatttaatgtgttaactgctgatgtgactagcgcattcggcccggataatttcactttgaccttttgtggatagccggtaatgaaataccgaccagtatctgcattaatctggagcggcacttttacggtttccgtgcgggttgctagcatctgtgtatcattgttattcgtctggcgcgtcgtgttaatttcatccaaattgacataaccaaacagtaacaacgctagaaataacgctaaaattcgatagagccatgggccttcaacaaactttttcatcatttctggcctccttttttgaagccatcaacaaattcttgtaagagactcgttttgttttcctcttgggtaatcaaatgcgagttgaagtacttcatataatcatcacggcttaaatcacgcattaactcgttattgcgcgttaatgtgacaccaccggtttcttcagaaacaacaatcgtcaaagcatccgttacttcactaatcccaacggctgcccgatgtctggtccctaattctttgggaattaaattactctctgaaagtggtaggtaagcggccgcaacggcaatcttatcatcgcgaattatgaccgccccatcatgcaatggtgtattcgggataaagatgttaattaataactcccccgtcacatccgcatccaaatcaatcccagtttcgatataatcttccaaaccggtattcatttgaattgtaatcagcgccccgatacgccgtttcgacatatactgaatcgacttatcgagggctttaattaaattattttcttgttcaatcttgggattaacgccgcgtcgtagtagcgatccacgtccgatatgttccaaaccacgtctaatttcgggttgaaaaataacgatcaacgcaatcacaatccagctgataaattgatccataatgtacgaaacagttcgtagaccaatgtaccaactgataaccttaatcagcgcaatgactataatacctttaaacaattggacggctttggtaccgcgaatcaacatgattaatttatacacaaaataccagacaacgatgatgtctagcacatttgcgagcatccgccacgttaataactgtgaccattcaaatgacataggtaacctccatccaaaaaaattctgtatctattataccatgaaccatttcaatctgctcattgtacttttaatgttgcattttaaactctaaaaataaatcattataacggccaaccgcagttggtgataaatcactataaactcgcaagcgatcgatcaccttttgacttggataatagcctgggttattccgtgttgctgctggcaagagtgctttggccggtatattgggcgttgaataaccaatatattcagcattttgagccgcgtttttgggctctaacataaagtttaagaaggcataggccgccttttcatgttttgccgtcttgggaatcactagattatcaaaccatagattgctgccctcttctggaattacatagtgcaaatggggattattatccaacatctcggcagcttcaccggaccaagtcacagcaacactcgcttcattttgaaccatatacatcttaatttcgtcagctacaatcgctttgacatttggtgccatctgatcaagcttgtccttagccgcctttaaaaccgccggattcgtgctattgactgactggccattttcgatcaagcccacggccatcatatcccgagcactatcgactaccataatttggccgcgataatctggtgaccatagatctgaccaatgtgtcagtggttttttaaccaattgatcgttgtagataatcccgagtgtgccccagaaataaggcaatgaatacttattcccaggatcaaatgattgattcaaaaaatccttgccaatattttgatagccggttaagcgacgatgatcaatcggtttaagtaagtgtgctttgcgcatcttttcaatcatgtactcacttggcaccgctaaatcgtaagcagtcccaccctgcttaatcttcgtgtacatcgcttcgttgctatcaaacgtctcaaccgaaacatgataaccagtttgcttttcaaactttttaataagtgctgggtcgatataatcgccccagttatataatgttaatgtattatttttcgtataaccttgtgatttttgtaattcaaccgtcccaaaccaaagggctgcacagaccactaaaatcgctaaagtgatgcgtcctaatttattcattttaagcccccgctttccgtttacgccgtgctttttgggcttggcttctttgattcaataaatagtagccggccacaaggattaaggagaagacaaacatcaaggcagataatgcgttgatttctagactaattccttgacgcgctctggagtaaatttcaacggagagcgtttcaaacccgttcccagtgacaaagaaggtcacggcaaaatcatctagcgaataggtgaacgccatgaaaaagcctgcaaaaatgccggaactaatgtacggtaaaataactttactcaggacttgccagtcagtcgcacctaaatcacgtgccgcatcaactaatgctggccgcatttcatttaacttcggcaaaaccatcaagacaacaatcggaattgaaaaagcgatatggctcagtaaaactgaaccaaagcccaaaccaaaacctaagaacgtgaagaaaattaaaaaacttgccccgataatgacatcgggtgaaaccattaaaatattgttcagcgataaaatcatattgcgcacacgccgttgcttcgttgaataaatccctaacgccccaaacgtccccacaatcgtcgcacataaagatgatagaatcgcgattaataacgtttgtaacacaatttcaatcatccgagtatcttcaaacaaggcctgataatttgcccaggtaaatgccttgaagccattcatattatccccactgctaaatgaatagaaaatcaaatagaaaatcggtgcgtacaataagacagagacaagcactaaccaaacgttttgccatttcatttttttcatttgttagtcaccttcttctttgctttttgctccccggttaccagcatgattaagcccatggcgacgattaagaccaccccgatggtcgagcccattccccagttcattgttgtgaggaagtgttcttcaatcgcagtccccagcgtaatcacgcggttacccccgattagacgcgtcaacatgaataaggataacgatggaataaagatggcctgtatcccggctttaaccccagccattgttaacggtaagatgactttcgtaaaggtttgccaattacttgcgccaagatcacgacttgcattgaccaatgatggattcaattcttctaaactattaaatatcggcaaaatcataaacggaatttcaatataggtcgccaccactaagaaactgaaattcgtaaataaaatctgttgtggcccaatcccgaaccaccccaaaaaatgattaatggcaccatcttgactaaaaatcccgataaacgcataagctttcagtaataagttaatccatgtcggtaaaataattaataatagccaaagttgtttatgtttcgtttgatgaagccaatacgccgtcggataactgattaatagcgtaatcagcgtaattaaaaaggcgtaccataacgaatttaatgtcatcttcaagtaagtgcctgactggaaataggtcgtgtagttgaccaatgtcgcatgcccattgatatcaaagaaggactggtacacaatcaatgcgactggtgcgaggacgaacaaaattagccagagggcatatggtaagtaatataaccattgttttttacgcaattgccttagtcctcctcttcgtaactttcaagtcgtgcatcgaaatcttcttctgattccccaaaacgcatgatgtgcacgtcttctggttcaaagaataagccgactcgttgaccatctttagctgggttagttgaatgaatcaaccaccggttttgatccgcatcataggccgtaatttcataatagtcaccacgaaatagctgcgtatcaaccgttaccactaattggccttggtcaacggcaacaatgtctagatcttcaggacgaagcaccacttcaactgcttcgttgacccgcatcccggcatcggcacattcgaactgcttgccgaccatttcaacttgataatcagcaaccattttacctggcagaatgttactttccccgataaaatcggctacgaaatggttgatcggttcgtcataaatgtcgacaggtgtcccactttgcaacacgcgcccttcgttcataacaaaaatttcatcactcatcgctaaggcttcttcttgatcatgcgttacaaataagaacgtaatccctaatcgttgttgtaaatcgcgtagttcatattgcatatcttttcgtaatttcatatcgagtgctgatagaggttcatctagtagcaagacttttggttcattggccaaagcgcgcgcaatcgctactcgttgttgttgcccacctgataactcactaatttcgcgattctcatatccggcaaggcgcaccaatttaagggcttcaatcactttttctttaatcgctgcttttttaactttacgtagatttaacccaaatgcaacattctcaaagacatttagatggggaaacaaggcataatcttgaaaaaccgtattgacttggcgcttattggccggtaaatcgttcatcttctgcccttcaaataaaacatccccggcagacgcattggtaaatccggcgataattcttaaaatagttgtcttaccacagccagacggcccaagtaaggtataaaacttacctttttccaacgcaatgtcgatgccctttaaaatttggacatcgtcgtattctttaatgacatttttaaattccaccattggttgttgcatcttcttcttcgtcccctttatctttagcactctcagactcgttattagttgactaatatcctattaattataccgtttccgagacgcaatgccaattcaaagcgaacattgttgtataatgaagttaaataattatttagaaatgaggttgtaatcatatggtcgcctatcaagcactcgttttagaacaaaccgatactactgtcagtgccacttatcaaactaagttaacgccagacctcgctaaagacggggtgttagtcaaagtcgcctattctgatattaactacaaagaccggctcgctatgaatcctaaaagtggcgtcttacgtcactaccccatgacacctggcgttgattttgctggcgaagttgtcgaatcggataatccgttctttgaagcgggcgatcaggtgttatgtacgggttatgaaactggcattacaatcgctgggggctacgctgaatatgtcaaagtccctagtgaatggctctttaagttgcccgaaaatcttagtcttgctgaaacgatgcagtttgggacggccggtttcaccgccgcaattgcgctcagcaaattattacgccaagcctttacagccgatcatgacaccccactcttaattacgggtgccactggcggagtcggaagtttcgcacttaccatcctcgcgcagcttggcttcacaaatctaaccgcaactacgcgtgacttgcaacaaaccgattatttattgcaccttggtgcgacccatgttattaatacagctgacctaactgctggtccgcttaaagcgctcagccatcagacattcaccggggttattgatacgcttggcggtcctgttttagcccacatcttaccgcaagtttgtgccggcggattcgtagcaacttgtggcaatgccgctggtgcaaccctagaaacaacggtgatgccgtttattctacgtgggattaccttagccggaattgattcagtctattacccgcgcagagaccgtaaagaactctggcaattactcgccacgacgtttaaaccggaaatttggccaacagttaacttggtcgccttttctgatttagcccgagaacttagccaaaagacgcataaaactgggcgcgtactggtcgccttttaacccaaaataaaaagccccgctaaatgatttggcggggctttttatcgtctaacgacgttcaaattgatacttaggttcttcaagctctggatcgtaatcaacctgtaaatcataatcggcaaaaaaccattcgtccgattgactcgcaaaataggtgataccatctttaacaaccgaaccaattggctgctcaacagtagcgcgttccatgcccaatgaaaagccatcatgcacggccgtttgaccatacactttgccaaaaaagcggactgcatcccccgattgtaaggctaattcgtcgcgaaaccattgacttgctgcatctgacacctgaatttgcatgttgaactcctcctgattaatcgactagttggttcttaatcgcataaattgccgcttgggtgcgatcatccacttgtaacttcgccaaaatatttgaaacgtgcgtcttgaccgtttttaacgtaatgaataattcatccgcaatctcttgattactacggcctttggcaatcaagcctaagacttcacgttcgcgattagttaagtcttcatatagcttaggttcagccggatgtgttaagcgattcatcatcttattcgtcacttctggctctaaaaccgattgtccttgcgccgttttacgaatcgtattggcaatttcctcggctgtagaagtttttaatatgtaactggccgcaccggcttcaatcgccggataaactttctcatcatcgataaaactcgttaagataatgattttggcttcaggccacgcctttaaaatcgttttggtggcctcaatgccatccatctcaggcatcactaagtccattaaaatcgcatcaggacgtaatgcaagcgccttttcgacaccttctttaccattgacggcttgatcgacgacatgaatatcgtcttgaacccctaaatacgttgagatgcctaatcgcaccatttcatggtcgtctactatcaatacattaatcacttaattggtctcctttaatagtggcactcgaatttcaacactcgttccctggttaggcaaactaataatttttgccgtccctccaacactatgggcccgttcgacaatgttgtttaacccataactgccggctttttgctcagcattcgtatcaaacccggtcccgtcatcaattacctttagtaaaacactctgaccgagttgtttcaagtatacttcaatctcttgggccttcgcatgccgtagtgtgtttgacagcaactcttggacaattctaaataaattatcttcgatgccacttggtaacgttatgctatcaatgtcccatgtaatctgaatcgcaattttggtcttcaattcgttcaataactgaatgatcccatcgcgtaaactcttgccttccaaattaactggtcgtagatgcaagagtaaggcccgcatttctgattgagcctcatttaacacccgttcaactgtcgttaaggactgcaacatctgcgcgttatcagcttgtttttgcgcaacttcactgagtgccgacaacatcatcgtcgccgcaaatagttgctgactcactgaatcatgtaactcgcgtgctaaacgatgccgttcttgcgctagaatttcttccttggtttcaccagcaatcacggtcggccgatcactataactttgaatctcttgttgtaagcgtatcattttttggcgtaattgttcaactgtttgctcgattgacatcgcgtagtcattggtttcgctctgtctaatctgaaaaacaggcgattcatactgtccagaaagtaaaaattgtaactggctttcagtatgggataattgcttacgtacgacaagatagacgattgcggtaactaaaaagcctactgccattgcggccaccacaatataaacaatcagtggtacatagaataattgcttcgtggccaaactaatcagccattgttcctgatgcgtactgtagaaatacgcaaaaaataacgccactgaaaacagaagcgtcaacaaactcgtgctgatccatataaagctccgcgttaacttgctcatactaagatcacctcaagatcaccaatcattacgttggtaatgattttaaggtggcgactttcttcatcatagtttgtactatacaactgaatcgactcatttttcaaattatagtgctgattgtcgattgtcacactccctaacattgcagagtgatcaagatagacaccggtcccgacaggcactaaaatccgtgtctttccaaaccccttacggatgacaatatggttgtcattcttgggtaaaatggtgctccctaaatcgataattgtatcaccggcagcgaccgcgaagttaatatcatcccattcaaaaatgttattgccaattgtctgatgaccaaaccaactatgccgcttgactgttgtctttttcgcggtgggttccgtcgtattaacgggaataaattttttcttgcgccaaggggcattatcaaacaactgattcatattgcggctgctaaactgtcccattcggctatgatttaaggctaaaaagacgaccgcaacaataatcattaaccataacgagaaattaattaacagtggtaccgtaacagctacgcaaccgaccatcgttaacaaagtcgtccagacaccgattttacctttactacgacgtttgttggcccagactaagagtaaaatacctgcaatgatgaacactaaatttgcgggtatcgtaatcatctgccaaatgaacgtcccgaagataatcgcttctattattaaaaaaacgcgccagataaacggcatatttacggtcccctttcaactgattaatattattatacaagcaaaccagataaacaccaatccgtctcaaggctgattaacgaattaacggcaaaataaaaaagccacgggattgatttccgtggcttttttgaaacgtgctttttggctgcaacaacttctgcttaatctaaaattggcagtcatcctaaaatctggatgactgccaattttgtattaatgctcagttgctaaccgcacccaaaagcactctattcttaaacgtgctttttcgaacaaccttttccggttaactacaaaacgggcgtcatggtcaaaattcgaccataacacccgtttttacgttaatcctcaaagactaacccgttcgaaacgcactttatttaacttctgtaattgtgacgtgcatgtcgccgcctggtgtttgcacagctactttatcaccaacgtgtttgccaagtaatgcttgggcaattggtgaatcatttgaaattttaccactgaaggggtctgattctgcagcaccaacgatttggtaagtttcttcttcaccatcttcgtcgtctgtaaagctaactgttttaccaacagcaatttcatcagctgcgatgctatcaacatcgattacttctgcaaagcgtaacatattctcaacttctgcgatgcgtgtttccaatgagctttgttcatctttagctgattcatattcagagttttctgataaatcaccaaagctccgtgcaattttaatccggtcaatgacttctggtcgttttaccattttgagtgtttctagttcttcggctaacttttctttgccttctgcagtcattggataagttttttgtaccattttatccacctctttattttaattaataatactgactatcttaattactgtgtacgtccttgtcaaatctcaatctttaatcggcatttaggattgattgaatctttgttacaagtaaatcaatggccacgcgattattgccaccttctgggacaattaaatcagcgtaacgcttggttggttcaatgaattcatggaacatgggttttaccgtcttaagatattggccaaccacatcatcaaacgttcgaccacggctttccatatcgcgatgcatccgtcttaataaccgaatatcatcatcagtatccacataaaccttaatatccatcaaatcccgtaaccgggcatcagccaatacaagaatcccctccaagataataacatcttgcggttcaacccgttgaatttcctccgtccgattatgaattttataatcatagaccggttgttcaatggcttgatgattttttaacattgatgcttgttcgattaataaatcgttgtcaaaagcatctggatgatcataattcgtttgttggcgttgttcaaacggaacatcttgccgtttgtaatacgcatcttgtggtaataacatcactgagtgattcgcaaatttttgggcgatagcctggctaacggttgttttcccgctaccggacccgcctgtaacgccgataatgatgggtgcttttttttgactggacatgggacgctccttttattctcaacttctttttgggcaaacagaagtcgacctccaatggcggtcgacttcgataatcctaaatgaacctaatcttcaatcgaatctgttgtatcgttatgttgttcgaaggttcttgagtaatatactttacctgtcttcaagttagcaacaaagtagagataattttgatcacgatcagctggattcaagacggctgtgacagactgtaaactaggtgagttaaacggtcctgggccataacctttattgatatataagttatatggtgaatcgactttagtatctttgttataaaggtgtgtcttgtgggtatttaatgcatacattactgaaatatcagattgaattggcatatcgatgtctaaacggttaaagaagacaccggcaatcttttggcgatcgacggctgtgaccccttcacgttcaaccaatgaagctagcgttaacgtttgttgaacggttaacttcttatccttaatggttgcataataaggttgcatcttttgatccatcgttgaaaccatttcggtgataatttcttttaatgtactatctttataaacttcgtaagtggctgggaaaaggtacccttctaagtgatagcggacatccttttgagccattgttgatgacaataatgcagggtatttcttctctaaacttgctaagaattgcttatcattcgcttgtttgatgaaggctgctttagagaattttgtttgtttaccaacttcggccgcaatttcttctaaagtgaccccttctttaactaacaatttgcccttcacatcgcgaggacgggttggtgtgccttctttttgtaagttagagatgatcttatctaaccccattgattgtttcaacacatgataaccggcttggaaatccgagaaattatgagtcttcacataataattaaagactggcgcgcttcgaattaattttttatcctgcaaaatagcagcgatttgtttattcgttgagccgttgggaatgcgcacggtaatttcttgttttgctttggtgtcgtatggtttaagagatgcttgtacgtagcgatatcccatgaatccaataatgacaacaagcgctaatagaataccgataatccaatagacaattttatttgctgcttttttttctgcacggcgttcttcgtacaatgattgtgccgctttttcttgatttactggctccttttgatcaactttcttcaaaggatgacctcctaattgctcttttaaatacaatccttaaaacattataccaaattattcaaaaattgcattaaagattcgagattaacggattttggcatcaaaagtagcaactaattcagcgactactttttcaaaagcagcgttaacttcttcttctgttaaagtagctgcctcattgaggtacgttaaggtgtaagccattgacttctcaccagcctcaatatgactccctgcgtaaacatcgaaaagttcaactgaaactaagtgggcgccaccctttgctttgatggcttcaacaattgcggcatttgaaacttgatcagacacctgaattgcaatatcccgcgttacttcagggaatttaggtgctggtttagcaatcactgtttgggttggcaaggctaggatttgtgctaaatctaattggaaaacataagtttcttttaaatgattagctttcgcaactgctggatgaatttgaccaacaaatccaaccagttgttcaccaacgtaaatggctgccgttcggccaggatgcatttctggataagcttgtgttggttgataactgattgcatccgctaagttgtaacttgccatcaacatttcaaccacacctttgattgtgtagaaatcaactggtgctgcggcagcttgccaagtcttcatttggcgattgccactcattaagccagccacatattcaatttctgttggccgaacttggtcgtctgcttgttttaaaaatacccgtccttgttcgtatagtgcaagatcagtttgtttacgtgccacattgtaagcagcatcgtccaataaaccagtaatcaagttcatgcgtaagtgcgcatgatcttgcgtcattggccaatcaagtgctgtcagcgccgaatcaacaagcgtaaattgacgcgctttttcaggggtcgttaatgcataactaattgcttgcgttaaaccagcaccttcaagtgtatgccgggttttacggagtgccttttgttcagtcgttaatgccccggttgtcatatcgccagttggcaatgtgcttggtaagttatcgtaaccgtataaacgagcgacttcttcaatgatatccgcttggatttcaatatcccaacgccgtggtggaatcgttactgttaaatgattatcagtattgaccacactaaaaccaaatcgttctaataattcaacaattgtttgcgttgcaatctctgtgcctaagacgcgattaatccggtcagcttcgatttcaatcactttgtcagttggcactaagttagttgggctaactgtaccagcagtcacttgcccattaccaaggtctgccatcatcatagcagcagcatctaaggctgtttgaacatcagcaacattcacgcctttttcaaaccgtgatgacgcatctgaacgcaagttatggcgttgagccgttttacgaactgcagttggtgcaaaaactgcggcttcgataatcacatttttcgtatcagcagtaatttgtgagttcaaaccacccatgacccctgctagcgcaattggtcgatgaccatctgtaatgacgatatcttcatttgttaagtcatgtttgccttcatcaagggtcgttaatttttcgcccgtcttggctaaacgaacttcgatttgtttgtgatcacccgttagagcatccgcatcaaacgcgtgtaaaggttgcccatacgttaacatcatgtagttcgtcacatcaacaaggttattaatggggcgaatgccagcattccataaacgcgtctgtagccacattggacttggttggacggtcacgttttgcaacatacgcaagtgataacttggtgctaattgttcatcagcaacttgagcagtcaattgatcagctgtttgaacgttgctttcagtcactacgatatcttcaaaatgaggtgtcaatgattcaatggcggccacttcatgggccacaccgtggatgccaagcgtatcggctcggttagcggtgaggtcaagatcgataatgtaatcagtcatcccaagagcttcataaacttctgtcccaggttcaattgcttctgggaagacaaagatgccatcaacatattccttaggcacaacgctatcggcaaagccaatttcttgtaagccacaaatcatccccattgaaaccacgccgcgcatcttgccttttttaatcttaacgttgtcagcaatccgagaattaggtaatgcaacgactacatattggccagcagcgacattgggtgcaccacaaacaatttggaagggttcatcttcaccaacatccacttggcaaacattcaagtgatcagaatccggatggggttcacaacttaaaatatgtcccaccacaatttttttcaagcccgcgctcttttgcgcgacatcagccacttcaatccctgttcgggtaattttttcagccaatgcctctggggcagttgttaaatctaaataatcttttaaccagttgtaagaaactttcatggtctagccctcctgtgtgaattgatttaagaatcgaacgtcatttaagtagaagttccggatatcatccacaccatatttcaacattgcaaagcgatcaaccccgagcccaaaggcgaatccaccatagacatctgagtcgacaccgccggcttttaagacgttcggatgtgtcatcccagcccctaaaacttcaatccagccagtttgcttgcagacattacagcctttaccatcacaacggaaacaagaaatatccacttcaacagatggttccgtgaatggaaagtaacttggccggaaacgtaaatcacggtcttcaccaaaaatatggtgaatcgtgtattctaaggttccctttaagtctgccattgtaatgtttttatcaatcacttggccttccatttgatagaattgatgcgaatgcgttgcatcatctgtatcacggcggtaaacacggccgggactaatcatcttaatgggaccattagcaaagtcatggttttccaagtcacgtgcttcattgggtgacatgtgcgtgcgcatcaataaatcattagtaatatagaacgtatcttgcatatcacgggctggatgattagctggcatgtttaacatttcaaagttatgtttttcatcttccacttcatagccagcaacgacttgataacccattccaataaataaatcttctaaatcatcaatcacttgagttaagacatgcggggtcccttttttgaccggttggccaggtaatgtaacatctaatgtttcgtgagccagttgggctgctgccttcttggcttctaattctgccttccgggtttcgattgcttctgccaaatcactcttgatttcattagcaaatgcccccaccttaggtcgttcttcattacttaaatcacgcatgccgcgtaaaacttctgtaatcggtccttttttaccgagcacttccactcgaatttgatttaacgcctctaaatcaacaactctttgaatttcttgcagactcttttgctgtaagttttctaattgttccttcaatgacattgcaattcctccttatttttttcaacaaaaaaagcccgtccctcaaaaagggacgaagcttcgcggtaccaccctagtttacgaccattccagtcatacactcaagtttgcgctaacgggcaataccggaccaatggtcaactcagaaagtgaacttcacctaaacttagttgaataacttgcagtcaactgattattctccctgaaaactaatgattaggttactctttttcgtctttgtttaataattgtattttaacgtaaataaccgcaattagcaactaggcttctgtcgcataccagtcgtttgaccaatcgtgaatagcagccattactggcgctaattcttcacctttagtggtcaatcgatattcaatcaacgcagaatcatcactggtaatccgcgcaacaatgccttcttgttctagttccttcaatcgttcaaccaatacgcgatcactgcacttaggcacactgtgcactaagtttttaaaccgttgtgccccgttttctaataggacatcgataatcaggccgttccacttcttacctaaaattgaaaaagtcttttcaaatttaggacacagttggaaggcctcttgacagtcagcatttgcgttttcttttacaatcaccattattttcacctcacacttattaataagaagtgtactgaaaaaggctgcaaaaagcaacctatcagcttgaagcatctttacttgttaattgccggtgtttggcggagaactttttgtttaaatttcgtccacattggtgtacaaaattccgtcacagcacaataatcatcgactatcgatacaatgtaactttccttatatttcggacgactaacagttgcgccccacatgtgtttaacgatgatgtctttttctttaggtgagagttctgttaatttttcggcattccgaagcgcaatgcgcggatggatataagcatgtgtgcctaaatcgaacttcgtatcacgccagtcataatagaataaatcatgtaataagcccgcgcgtgcaattgctcgcgtatcaagatgccacttcttggcaagttcataactgcgataagagacgcttagcgaatgttccaaacgatctgaatgatgatgttgcgtatagttcgctaatttttggacttcatctttagctaataaatcggcaattagagccatgtaatccgcgtcatcgtaccattttgctgttgaattcattcaaagactcctgacattttttaaattcaaattctgccacaaggataacagcttttcgttcaaaaaagaagttaaacgccttaaaaagttacatttgttagaaaaaattaagaattaagcttcaatcaacttgaacattaaaatcccagctgcgactgccacgtttaatgattcagcattccctggaattgggatgtaaatattttgcgttgtggctgctaagacgttttcattcacgccgttcccttcattacctagaatcaaggccatgtcatttgctttaggcacatcttgataactgatggcctctggatttaattccgttccataaactgggacgtcttgcgaattgaatttcttcatccagtccatcaagttaccttgataaattggtaaatggaagtgactgccttgcattgaccgcaagagttttggattatacaagtcaacactgccattgcctaaaacaacgccggcaaagtctgctgcgtcggctgtccgaatcattgtgccgatattaccaggatcttgaacagcatctaataataagtaacgacccgttaatttttctggtaccggtgtttcagacatttcaacaacggcaaaaatgccttggggtgctttagtttcactcaagtgttgcgccacttctggtgcaatttcaaaagtttcatcgtaaagaccgcgcaatgcgcgttcgtccacatatttttcagtggcgaaaacttggcggatgacggccttattttggattgcttcttggactaaatgccagccctctagtagatacgtattttctttacgttggtttttcttaacggttaatttcttagccgccttaattttagtgttttgattcgattgaatgtattccatgttgtgctccagtctatttagtactttctattatacgcgacttagtgggtaaattctatcaagggtcgctttttaatcgccaaatcgggttgaacagcttacaatgaagaggaggtgatgacaatgcaaaatgcaattcaacttgaagtctatggccgcgtgcaaggcgtcggatttcgctggatgaccaaattggtcgccgataaactccatatcacaggtaccgttgccaatcgtgacgacggctccgttaaaattattgcgatgggcccagcagacgcactcgaaaaatttatcggtgctgtcaaagcttctcccacccctagtgggcgcgtcgaccgtgtcattcaaacaccgctcgaaaatgtgtcagcgtgtcataaattttcggttgtcagttgaaaaacctagccccttcaagtatagttacacttgttgaaacttatcttgaaagggctaaatttatgaaaaattctaaacgcttcgcgacactcgcgatgcttacaatgaccgttacattctttctcgctggctgtgttccacaaaaaatgagcagccatcccaaagtcccaaccggcttaatctatggttcatcctataaatacatcgccgtgccgctccaacatattatggaacgcattgctgatgttttcggtggcatcaatggttacggctgggcaattatcatcatcacattcgttgtgcggatgattttactcccattaatgttgaaccaatcgaataagatgacggcccaacaagaaaagacccgtcgcttgaaaccgcaattagatattatccaagaacaacaaaaagcggcaacaacccctgaagaaaaggctgaacttagccagttgatgatgaaggtttataaggaaaatgattcaagcatgatgccaagtcttggttgtttgaccttattaattcaattaccaatcttctctggtttgtatcaagccatccaatactcacctgaaatttcaagtagccacttctttgggatcggtcttgggagcccaaacattatcattactgtgattgcgaccctcttatatgtcggtcaaagtgcactttcattagtcgggatgcctgctgaacaaaagaaacaaatgcaaacaaccgtcctaatgagtcctgcgattacattcttcatttcgttatttgcaccagccggtttagcactttatttcttagccggtgggattatcatggtgattcaacaattaatcacgacattcatcatcatgcctcgtgttaaaaaacggatcgatcaagaaattaaggaaaaaccaatcgtcacggttgtcacaaaagaaatgttcactcaaaaagcagcagtcaaaccagctgccgacgtcacagaaacaccaacagaaacaagcaacccaactgtcgctacacctaaagtagctggcaaacgcaactcaggtaagcaacggcataagccacaagcttaaccaacaaaaaaaagcggtgcgcctcaatcaattagatgattgaagcgcaccgcttttttaatccgtattaactggttcttctgattttggttctacttcacgaatcagtggtaactcaactctaaaaacagaaccgtagccaacgctactttctagcgacacattcccgtcatagccttcaacgagttgttgggcaattgctaatcccaatccattgccacctttttcccgactccgtgctttgtcaacgcgatagaaccggtgaaagactttcttcttatcttcttccgaaataccttcaccaaagtcttgcacggccacttgcgcataccgctcatcactagcgacggcaatatgaacttctttacgtatcgttgaatatttaatcgcattatccaacagaataatcataatttgttctaagtgatttcgattaacatgcactagcgctggttggtgcaaatcattgtcgagcataaaattaaattctggatataacatctcgaagttatggtaattctgaagaacaacttccccgacatcggtcacttcagtcgttccttcagtcacgactttatctgcccgtgttaaatcaagcatttcttgaattaaatttttcatccgcaagatttcttgtaacgaagccgctaaagattcttccagtacctctggatcatctttcccccatcgattgagcagttgtagatgcccttcaataatcgcaactggtgtccgcaactcatgcgaaacatcactgacgaactggtcttgctgttcgaaataatgctgaattcgattcaacataccattaaacgcactgaccagatcagataattcatcttgactatgcccagtctcaggaattcggacatctgaattaggctctgaattaatggcttctatcgtttttttcataacttcgattggtcgcaagaattggttggctaataaatagccaatcaatgcactaaataacatagcaaaaaagacaaccacaactaacacaattcttaattcagtcatagcgtggttataatcacggacgttattgaccacctctacataaccaattacacggttttgacttgtcttaatcggactaatgccaatcagccgcatcttaccaaaaatagctttgcgctttaatgtatccgtatcgccttttggaaacggaccaatcgccccgcgcgatgcaaacaaacccttcttgtttgcatcataaatcttaactgtaacatcctgttgtgctaaccgcgttaaaaccgcatcttgatagatggctttaggactgtgacggttcggatccaattgattggtgacaaagccttctgtaagatgtggcccattgctggacaatctcgcttgtacgacggtcaccgtatcgtgcacattgtcgacttctctgtgtagcaagatattagagatactactaaagatcacaattgaaaaaatcgcaaaggtgataaaaatggccaacccaaccgcagctgcccatttgacctttaacgatattttacgacccttatttgttgttgatgctaccgtttcgtcctgcatcacgagcgcatcacataacccattccacgaaccgtttgaatgtaactttgttcgccagaacgatcaattttatttcgtaagtaacggatataaacatcgacaacattggtttcaacatccgaatcgtaaccccaaactttgctgagtaagacatcgcgtgccaaaacaacgttgacgttttccatcaatgttaataataattcatattcacgtttcgttagttcaatcacatcatcaccacgccgaacaactcggttttctttttcaaccgttaaatcacggtaagtaaccgtcgtttgtttagcagcgttatgttcgccttcgatatcaattcgccgtagcaatgcccgtaaacgcgctaataattcttcaatggcaaaaggcttaacgatataatcgtctgcgccatgatctaacccagaaacacggtcaatcactgaatcacgagccgtcatcataatgattggcgtattcttaacttggcggacccgacggcagacttctaacccgtttaattcaggtaacatcaagtctaataaaatcgcgtcccattcttcattcaaggcagcttctaaaccagtacgcccattgaaatggacctctgtctcataaccctcatgctttaattcaagttccacaaatcgagctaaatttttctcatcttcaataatcaatatgcgactcatttagtcactccccaaaaaagaatttttaatggactctctaaattctaatcaatgataagaattctctaagaaacatcaagcgccaaaatcggcttacctttccattctagcatagttccaattaaataactaactaatctgactctcatctgatggcgatttagtaataatcgaaaaaacacctgcgccttaataatcggctcgggtgtttagagaaacgtgcttcctcgaactgtcttttccggttaaccgtaaaatgatgcttatggctaagaaccgccataagcatcatttttctgttaatccttaaagccaaaaacgttcgactcatcactctattttaaaacgcgcatcccgtcgcagccatttccgcttaatctaaaattgccattaatcctaaaaccgggattaatggcaattttttattaatgctcaatgactaaatgcaatagtcagcactcttgtactaaaacgtgctccagtagacatccgcttccggttagttgcataccgcaaacgatcggtttcaccgctcatttacgatattccactaatcctcagcgcatccccgtctacttgcgcactctattgttctttataccaagtataatggaatgtgccttcgcggtctgttctttggtatgtgtgcgcaccaaagtagtcgcgttgtgcttggattaagtttgctggtaatacttctgaacgatatgaatcaaaatatgtgatagcagctgagaaaccaggtgctggcacaccttgttggatggccattgcagctacgtcacgaacagcgccttgataattctttgtaatatctaagaagtaatcatccaacaataagttgtttaaatcagcttttttatcaaaggcatccgtaatcttttgtaagaaacgggcccgaatgatacagccttcacgccagatcttagcgatttcgccatagtttaatgaccagtcatattgatctgaagcaacccgcatttgttcaaagccttgcgcatagctcatgatcttgctgaagtacaatgcttggcgaatcttttcgattaattcttttttatcttctgttaatttagcaacggttggggctggtaaaatcttgcttgcagccacccgttcgtctttcattgctgaaatataacgtgcataaacagattctgtaatcaatgattgtggcacacccaattcaagggcgctttgtgaactccacttaccagttcctttgttaccagcagaatctaagatgacgtcgacaattggtttatccgtttctaaatcatcttttcgcgttaagatgtccgctgtgatttccattaaataactgtctaattcgccgtggttccattctttgaagacatcagcgatttcttcaacagataaaccaacaacgtttctcaataaattataactttctgagatgagttccatatcaccatattcgatcccgttgtggaccatcttaacatagtgaccagcaccgtttggcccgatgtatgtgacacatggttggccatcttcagcctttgctgacatttgttctaagattggtgcaactaattcataagcttctttttgaccgcctggcatcattgaagggccttctaatgcgcctaattcaccaccagaaacacccattccgataaagttaatgcctgacttatctagttcagcattccgacgaattgtatcgccaaagaaggtgttcccgccatcgattaaaatatcacctttatctaataaaggtaacaattcgttgatgacagcatctgtaccagcgccggctttaaccattaagatgattcgccgtggtttttctaatgattgaacaaattcttcaattgtatagcttggtaccaatttcttttcgctgtgatcttgcatcactgcttctgtcttagcacctgttcggttataaatcgcaacggtgtaaccgcgactttcaatgtttaatgctaagttcttgcccataactgccatcccgatgacaccgatttgtggttgactcatgtaaaaggcctcctaaatgatttctaaatttaagcgttgttgactatcaaaacgacaacgcgtctactgtgtttatgttagcagaattacgctttaaataaaagcattttaactgatttggtccggtccatttaacaaattgggtataaaaaaacgccaaacttagtcggcgtcattgttttgttcttctaataattgtttaagcttagcaaattcaggattgggtgccgtttcttcttcagcctgttgcttagcataggcttcttcagaaatgactgaccacgactgtccggctggcatcacatcatcttgttcttcttctggtgttaggatgtgacttggaatgtgcaagagaatgtgatcttcaacagctacctgtagctctagggcttcgccttcgattgggaacaaaatatcttcgtccgtaaatcgtcccaactgctcgtcttctggatcaacgtagatttcagtgaattcaaaatccattggcaaggctactggatctaaactccgcgttgatggcactgttaatgtcccgaccacatgtacgcgtgcaattacagcgcgctggtcaaccgttaatccaccgtctactacaaatggtgtagcatctaggacatcagcttctcttttttgtaaactttcttttaacatcaatgtttctttaaacatcaatggatgatcacgatgttttaataatgattggactgtccattttaacaatgctcgtcatcctttctttggttaaaaatcggttggcgggcaaaattctgtgattgccagccaaactgttcttgtaatcgatcaactcgcacctctaaccccagtgggccctcttcggtacccaatttagctgagaccttactgataagtggttgatcgagcgtttttttcaacgtgtgcaaatgcgcctggccgacttggttaaagccaagcaaatggatgggccgctgcgctaatgattgttcaatatccgtttgttgaatattcaacaggacgtataaacaaacccgttgcaagcgtgcatacgtatatcgctttgttttaagtgcctgtaacaactcggcataccgattgactgaatgaatcacctttttgaaacggtactccaagccctctgacatctgataaatctgccgaagttgggcaaggggtgtactttcaattcggtatttcaatagcggccatagttggtcccaatccagatgcgattgagtctggagcgctgttaaagtcgaatgcggcatcactggggctaactgtgcccagtcatcaccctttgttgccgcctgtcggatagcactggcactagcaaattgtcccgcgccaatcgtttgatcgccgtgttgtgcctgctcacgcttaatcgcaagcaactgcattggcacttcaagttgcgcgttggcaaccgcataactgacccctaagaggtgattgggttgatctaaatttaaatttaattctgcttgataaaactcattgagctgcgtcgcataagttttttgataatcaataaacgtctgtgacttggcctttaaagctaaaatctgttgcccgacttgctgatagtcaaacgttggatattcactgccaaacgctaaggtctgacaaccaagcgccgccaataacttgacggccccatcagcaaaacggtctgcaggttggacagcactggcaaacggcaattcaacgaccatatcagcaccattgctcaaagcaagttgtgcgcgcgtccatttgtccaaaatcgcgggttcacctctttgcacatagttaccgctcatgcagacaatcactaaatctgcgtgcgaagctacccgcgcctgttgcaattgataccgatgtccattatgtagcggattatattccgcaataatccccgtaattctcatgcgtcctccgcctatttcactgcgctaaagaaccaacgcacactatcttcttgaacggcttcttggccaaaatcagcactgactgatacattcttgaacccagcagcttctaatgctgcaacataatctaccaccggataagttcgttcatggtgtaattcattaagttcttgataaccgtcaatctcgtcatcccagataaaaaagctgagatcatgttcaactgaatgtggtacttcacctgcgtaactcgtccacatgaaggccgtttctgccgtcttatcgttatacataaaacctgggaaaagctcatccatttgataaagtgaatgggcatcaaatagaaattgaccacctggctctaaatttcgataaacttgttcaaaaacttgttggacatgcgctaaatctggcatgtaacagatcgagtcgtcaaaacaagtgaccgcttcaaacgtcccaatttcgcctaagtcaagcatgtcgccttgtaataaaggtaactcgacctcggcttcagaagccttttcagaagcgatactcaacatctcggccgataaatctaagccgacaacctctagccctgcttgttttagcaagatggctaaatcaccagccccacaagctagttctaggactcgatgtttattttgtaacgtctgcaacgtgtaatcccgccattgaccatataatgaatggtccatcaaacggtcatagacggttgcaaagctttggtaaatcattcttcatccaaccattcggaaacatcaacaagtggtgcttgatcccaaagtttttcaaggttgtataaggcacgttcttctggcatgaaggcattgacaacgatatcgccaaagtccatcaagatccaacgtgaaccctttttaccttcgatgtgttttacgaaaacgccattttcttcttctgcgtcttcaatggcgtcaataattgcgcctaattgacgttctgacgtcccagttaacatcacgaagtaatcagctaataaactgatgccttccatgttcattgcgacgatgtcttctgctcgtttgctatcagctgcttgcacagcaatttttaaaatatctaaacttttcactaaagttctcctttatttggcttgagtcggtacccaagcattgtatgtgtcgattgttttcggataaatctgcttcttgccctgaattaaaaaggtcaatgtatttaagatttcataccgcacgccggctgctaaatcagccattgctgtctcacgagcagcttctgcgcccggaaaattgcgcccaggttcgacaaaatccgccacaaataaaatctgatcaatcaaggtcatttctggcgcaccaatcgtatgacgacgcacagcatttaaaatcgtttcatcatggatttctaaatcacgttcaatgaaataagcaccaacaacaccgtgccagatggcattaccgtaattgagtagttctggatcaaagccttgcgttttaatcgcttcaatgaacgtttcatctggtaattgcttagcatagtcatgcactaaaccagcaattgccgcgcgttcaacatctgcgccatttttttgtgctaattgaatcgcggtggcttccacacgcaaacaatgttcaaatcggctttcagataagttagcggcaactttagccactaactcagcccgtgtatacggcacgatgttttcttgataaacaaaatcactcatgatagaggccctctttttgaatgtattcaaagactgggtccggtaacaagtaccgcactgaacagccttgttgaatcttattgcgaatttgcgttgaactgacatcaattaccggtgcgtccacccataagactggatacggcgtttgttgagcataccctgttcgtttaacaccaacaaattggactaactgcactaaatcatcaattcgataccaagtaggcaagtagtcgaccatatcaccgccaatgatgaaataataatcgatttcagggtgttgttgttttaatgccacgatcgtatcgtaggtgtaactgacaccgccacgttcaatctccgttaaatcgagttcaaaatgcgaattgtcagcgatggcacgttctaccattgcaacacggtgttttgctggtaatgtttttttctcatcaacgtgcggtggattggcatctggcataaacaaaattttatcgagaccgagttggctacgaacttgttctgccatcactaaatgaccgatgtgtggcgggttaaatgtgccccccataatgccgacttgcaagcgatggccatcttctacaaccaacacgtccggttcagtcacatgatttgtctgctttagcgttgcactttgcatctgatcaccgccttattagcgtccgagcttagtaacaatcgttgaaatcttttggtatttttctttccgtgaagctttataaatcaccaatgtgcgtccaattttttgcgcaatttcgatgcgactgtcatgttgttttaagaagttggctaattcatcaacggtcacttctgttgtttgtaacaagttaatcttaacgagttctcgtttttcgatggcctcttcaatttgttcgaaataagtttggcttaagccgtttttgcctagttgaaaaagtggtttagtggtttgcgctaaaccgcgtaagtaatgtttttgtttgcctgttaacacgtgcgatacttccttccctaattaaattaatgctttccgaatcatgactgagacacctttaggcgcatatcccgcaaccacgacattttctggtaacgtaatccagcctaacccagcaaacactaaatcactcttttgctttgttgagaattcataccgttggagttctggaaaatcagctaaatcttctggatgtggtggctgtagcatgtcccctaattgcttagcgtagaattgatctgcattttcaagtttagtccggtgaatgtaaagttcattgtcaaaataaccgacaaagccatgccgtgcaccttgaatgaaatcaaaacgagctaacccacccaagaacaatgtttgttgttcatttaattggtatacttttggtttaatccgcttttgcggcgcaatcaaccgtaagtctttatcatgtaaataatgcgccatttgttgggcatgcataatccctggtgtatcaatcaatgcatgatcatcttcatacaatggaatatcgatgcgatctaaagtcgttcctgggaattgtgacgtcgtaatcacgtcgctatctaaaatcccagtttgcttgataatgcggttaatcaacgttgatttaccaacgttcgtcaccccaacaacatagacatcgcggcctttacgttcgcgttcaatcacggccaataattcatcaactgaattcccttttttagcactgaccaacatcgtttcaaccggatgtaagccatgttctttcgcttctttttgaatccaattgatcactttatttgggttaagagcagatggtaagatatcaaccttattccccactaaaatcacggggttatcgccgataaaacgatgtaaccctggaattaaactcccgttaaaatcgaagatatcgacgacgttcacgatcaacgcgtcactgtcgccaatttggttcaataaggctaagaaatcatcatcatttaatttgatatcactgatttcgttgtagtgtcgtaatctaaaacaacgttggcaatacaattgacccgtttccaagccttttttaagcgctgaattaggcgtatagccgagtgcttctttgtccgttgtttggatgcgagcgccacagccaatacaaaatagttcttcctcagtttgttgtgtttcagtcatttaaatcctcccgccaagttaaatctgcgtgtttttttagtagttgttgcataatatatttttcaaagaatcgattaatcgatgtattccaggcatcactgtcaataatgggtttgaccaatatcgtccggacgccagccacattaccggcatgcatatcggtaatcaattgatcgccgaccatcaccacttcatgtcgcgaaaggccaagctgcttcttcgctttggtaatcccagttgccaatggcttgttcgcccgagcaatgaatggtaattgcaattcactgagcgcgcgttgcacgcgatcatggttgttatttgaaacaaccatcacggtgatttcggcagcttgcatctgtgctaaccaagcttttaactgtggtgtgccatcggggttattccacgcaattaacgtattatctaaatccgttaaaacggccttaatcccttttgccttaagttgttctggtgttaagtcgtagatggcattgaccatccaagttggcttgaaattctttagcatgtactgtcccctcgactttaatgtgctttcatcaacagcttcttgcgctttgctacacttatcaaatcggcgcttgcagcgccaattcgctaagttaggcaaatgctcggaagctaaccgtggatgacgcacttcttttctttaacgtgcttttcaaaccatattcctgtgcctagcgacacaagtcaaacgattacttgcagcaatcattcgccttgttaggctagtgctcggagtataccaggtttgaacgcacttcttttctaacgtgcctcagtaggcatatttttgcggctagcgacgtccgtcaaacgaccaacaagttggtcattcgccagactaggctagtcctcgaaatataaccgcctactgacgcacttctttttaatctagtcactgattaattatagggtatttgacaccaaattgcacctttacgcggttaatttccataatttccaactaattcctaatccatttaaatccataagtcaaactaatcgacttttagccccaactctggtacgtttaaagaaattgagaggatgtgtttgttatggaaaaattcggttttaatcactttggcggccctgacgttttcgaacgtttcgatcagcctcaaccaactccaaaggacaaccaagtcctcattaaagtgctcgctgctggattgaatccatacgatgttgcactacggaatggttcacaagattcagtgcgcccattacccttcccaatctttcctggtacagatgtggttggtgaaatcgttgaacttggtgctgacgtcgatgattaccgcgttggcgaaatcgtcatcaatcaccgatcaatgggtgcttatagcgaatacgtaacggctagtactgcgaagattctccgtaagccagccagcatgagtatcgctgaagcagccggtttacccagtgccggcatcactgcttacaatacgctgatgcacttcacaaactttaaacacggcgatacaatcgctattatgggtgccagtggtgccgttggtagtttactcgttcaattaagcttagcagctcatttaaacgtgattgcaattgccaatagtgctaacctagactatctgcgctcattcggtgtccaagaagtaattgcttatgatcagccatctgacttcgaacgacttgcgcagaccgctaaaatcggtatcaacttaagtcgcgatccagaatcaactgaacgcctcaataacttagttgcaccaggtggcacattcacttcaacgaccatcttaccaacagacgatcaacaacgcgctgacatcaattaccaatctgtctatccgcgtaaggattatgcagatttaaccgccttacaagatttaaatgaattgatcgatcaaggtttactacacaataccgtcttcaagacgctcccatttactttggaaggcattattgaaggtcacaagctccttgagagtcatcatgccccaggtaagattgttattagccactaattttataatgataaaagaaagagtctagaacaaaacgaagttttgtcccagactctttttttgatctttaattatttgtttaatgcagctttagcagcttcaacaactgatgtaaatgcagcagcatcgttaacagctaagtcagctaacatcttacggttcatgtcgatttcagcgactcttaaaccgtgcattaattggctgtatgagatgttgttcatacgagcagcagcattgatacgagcaatccataacttacggaagtcacgtttacgttgacgacgatcacggaatgcataacggtatgaaaccattacttgagtatttgctgatttgaataataaatgtttagcgccgcgataacccttggctaattttaaaatctttttacgacgtttgcgcgtcactgttccacctttaacacgtggcataagaatttcctccttgaataacaaacaacgtcaaagcgttgctgtactgatctaatttttgcttgaatccgaaaatgctatggcttatttaaggcctgataacatttgacggatacgtctcatatcgctatttgaaaccattccagattttcttaattgacgacgttgtttcttagtcttgccgtggaaacggtgacttgtgtaggcgtggctgcgttttaggccgccattacctgtacgtttaaaacgttttgctgaagcacggtgtgtcttaaattttggcatgatatttcctcctaataaatcagaaacagattttttatttttggtcctttagcggttctaacattaagaacatgctacggccatccattttaggacgtgctgtaactttagcgatgtcctctgtttctttagcaagtctttccaatacacgttgcccaatttctttatgcgtaattgcgcgccccttgaaacgaatagaagctttcactttatcgcctttgccaaggaacttacgtgcattgttcaacttagtattaaaatcattttgttcaattgtgggactaagacgaacctctttgaggttaatggttttctgcttcttacgagcgtcacgttgtttcttttgaagctcgaaacggtacttaccatagtccataatacgagcaacgggtggttttgcgtttggtgaaaccaaaacaacatccatattagcttgatcagctaatgcaattgcatcttgagtactcttaataccaagttgttcgccatcttgagcaatcaaacgcaattctcgtgcacgaataccatcgttaaccatcaaatcttttgctatgactcttcacctccataaagtttagagagaaaatgcagctaagtaataaaaaaagcggccctctcataacagaaaggcccgcttgttcggttacttagttcgtccgaattagaaactatcagcccagagacatcaagtgtctactaaggcgagaagcgggaacttctgctttatttctcaacgaaaataagtatactcggttaggaatttaaagtcaaggaaatcccgcatttaaatttacgtgtacttagttgccgtaatgattgtccactaagtgcgtggcttttacttcgtcaatgttgtgtgtaccagctaattgcatgactaattctaattctttttgcaagtagttaaagacactttgtaccccttgtgcaccgccaagtgctaatccgtaaatgactgggcgcccgattgcaacgatgtctgccccttcagccaatgctttaaagacgtgttgaccacgacgcacaccactatcaaagacgattggtacccgtttattaactgccttagcaacgacgtgtaatgaatcaaaggctgcagggccaccgtctaattgacgaccaccgtggttggatacccaaatccctttagcaccggcttgaagtgcaatttcaacgtcttctgctgtttgaatccctttaacaaagactggtaaatgtgtgtattcagaaatgaattcaacatctttagggttcaaacgttgtttagctgatttgtagacggcatccattgtttggcccacacctgtttggtaagcttcaacgattggtaacccgactgggaatgtaaaatgattgcgtttatcggtttcgcggttaccaccaactgtggcatcagctgttaagacaatcgctttaacgttatgcgccatcgcttcatctaaaatcttacgattgatatcgttatccttactcatatagagttggaaccattgcggtgcgccatctgctgcggttgccatatcatcgatacttgctgacgcaaatgaactcatggttaagattgaaccgtaatcagccacacctttagcggttgccgcttcccctttagtattcactaacttatgagctgcaacaggtgccataatgattggtgatgttaagtgatcgccaaagatttcggtagttgtatctggattttcgatatcttgtaaaacccgtggtgcgatgtatttgtgattaaatgccgtaatattttcgttaatggtataaagatcacccgcgccactgtaaatatacccaaagccacccttgggaacaacttcgccggcttctttttccaagtcatagaggttaataatgtccaatggttgctctgctgaacctgcttgatatttttctgtcgtcataataacgcctcccattaatcaacgattggaaccgtttacatatttattataccgcttttttagttgtgcgcaattaaaaaaacaaaaaaacgtccgaaatgtcaaaataacatttcggacgttttaataaccgcttataggttgattgttttgtgatctttaccatcgcgactgtagttaccaacttcagcaacgattgcatctacaaacatgtctgaagcttcttcagcagcgttttcttcaccgtatttacggacagaaaccgttgcgtcagcaacttcttgatccccaacaactaatgtataaggaatcttgcttgtttgggcttcacgaatcttataacccatcttttcattacgatcatcaatgcgcacacgtaaaccatgtttgatcatcgcatctttgacgttctttgcataatcataatgtaattcattcttaacgggaataatcacagcttgagttggtgctaaccatgttgggaaagcgcccttgtagatttctgttaagtaagctgtgaaacgttccatcgttgatactaaaccacggtgaatcataactggacggtgcatttcgccatcttcgccaacatattgtaattcaaaccgttctggcaacatgaagtctaattggattgttgaaagtgtttcttcattgcccatagctgtcttcgtttgaacatccaacttaggaccgtagaaagcagcttcgccttcagcttcaacgtaatctaaaccaagatcatccatagcaccttttaacatcgtttgtgctttgttccacatttcatcatcagcatagtacttttcggtattagcaggatcgcggtagctcaaacggaatgtataatcgttgatattgaagtctgagtacacttcaatcattaatttcaaaattgacttgaattcatcttgaatttggtcaggacgaacgaatgtatgtccatcatttaaagtcatttcacgcacccgttgtaaccctgaaagcgcacctgatttttcatagcggtgcatcatccctagttcagctaaccgaattggtaattcacgatatgaacgtgggtggtgtttgtaaacttggatatgtgatgggcagttcattgggcgtaattcaagcatttcgccatcgcccatatccattggtgggaacatgtcctcacggtagtgatcccagtgacctgattgtttgtacaaatctaagttcgctagaattggtgtgtaaacatgttcataaccattggcaacttctttatcaatgatgtaccgttcgattgaacgtcggatggtagcaccatttggcaaccaataaggcaagcccgcaccaaccttaggatcaacaaagaataagtctaattggttcccaatcacacggtgatcacgttctttagcttcttgacgacgctgtaagtcagcatctaagtcagcttgtttgttgtaagctgttccgtaaatccgttgtaacatcttattacttgatttaccttgccaataagcgccggcaaccgataagagttcaaagaccttaacgtcgctcactttagctagcattggtgctaacccaaaatcagcaaaatcgcctaatttgtaaactaagacttggtctgtttccatttcatctaataatgctaatttgtaagtttgcccagcaaatagtgttttagcagcagctttgtctaagctgacacgttcgattgccccgccagcttggattaacttgctcattgcttttttaatgtctggtaagtcggtcacagctacttgaccagcttcgttttcggtatcatagaagaagccatcttcagttgcatgtacttcgccgaattgcatctcgggataagcacggttcaacgttgcagctaaaacaaaggctgccgtattccaaattgccatcaaatcggttgctttgtcgtctttagtgatgatttcaattgccccatcttctaaaattggttgctgtaaatcaactaattcaccgttcaatttaccggcaattgcctttttagctaagcttgtactaattgatttagcaacatctaaaagacttgttgcttgttcaaatgccttttgggcaccatctggaaaagttaattgaatctctgccattactattcactccttctaatttgtcatcaacaataaaaaaagtccctgagacgcacgaattgtgcagctcagggacgaattaatttcgcggttccacccagattgagaccccaacatttggttctccaactttaagcgtctataacggaaacgacccgatcagttgtattgcctttgaaagtggtcaattaaatgggggtgaaaaactttcagctatgtttttctctctgcgatggttcatttaaaaggtgtctttcatcattgattgattctattaaaacacttaattgcttttttagcaagcctaaattactaaggttgtaagcggcgattttgaccaccaacttcaatttcttgcgctaaatagcgcacacgttgcatgatgcgggccgctttaaccggttcgtctccttggttgctagttgtcaaatgcgtctctaattcagtcattgtgaagtttgaactgaagaaggtggcgagttgttcttgcattcgatattgcaaaataatgccaagtacttcatcccgaacccacgcactcattgcatcagcaccgatatcatcaatcatcagaatcggtgctttttttatcacgttaaccttttctaacacattgttttgcccaattgcattcttcatctccactgaaaatgtcgggaaatgaatcaacgtggtttcaaacccggataacgccagttcgttggcaatcgcacctaacaagtaagtcttgccaaccccgaattgcccgctaaggtacaaggcttggtgaaaatcatggggtgcttgccgataagccccgataaacgcggtagctttgatcaatgcgtcaaaccgattggttggatcgtatgaatcaatcttggcctgttcaatatcgcgcggcatattaattgacttcactcgtgcatgcaaggcagcttgttcgcgctcttgtaataaacttgccgtaggctcataactgacatcgataaaatggttatttaagactaactttggcgcataacccggtgccaaagtggtttgcccattagctaacttcttcttttcgatgacgtattcgtaaattttagcggcactacgcgtgaccgtttcttgtgataagcggtctttgttagcttgtataaatgcttggacatcggaatcgttcaaggcatcttcgaccaatttattaaactgttggtttaacttttgccgattcatgtaatccgtcaaatctttacccatattttccattacgattcccgcccctcacgaatttttttcaacgccacttctagttcatgctgatgctcaggtgtggttgtttcttttggcgcttgataatctggtttagcccatttaggtactggttcttttttagttttgttctgataacgcgtttggcgattgttttgcacctttgccgtctgtttggtttggaaatcgcgaatctgcaaaatcgcatccgctgccgtcttaaccccttgttgagcccactggttcgcaatccgatcgactagcgcctgagtgagcccatcatattgcgtaatgatataaacgaccaaaatattgagcacatcattgttaaagatatagcggttttgcaagtcctttaacgcccggatttcatttttagcgacaaagccgtggttcttttgtttcaagtattcgagataatcaactggcaagtagccctgactttctgttagccactgcaattcctgttcgttaaagccggctttttgccattctttttgtaactcggctaacggtttttgcgttgttgtagcagctggcgtttgccggttactctgacgtcgtgtgtaattgttcaagacgttctgttcgagcgctgccatattaatcgtactgtcagcaacattcatcgtcaagccaatcaaacgcgctaagtccatctcatctagaccatagaaataatggagattaaacaagccctgttcatttttgagaatttgatccgtatcaatctggtattgcgccgttacatcttgtaataggtcccaatcaaaagtccgcaactcaaccgaggtaaactgcggtgtgctagctgctttttgttgatacattgccttagtttcagccacactgcttggcgcggtcgtcaataaatcgttttgcacatggaaaacggtcaagaaattcttagtgacctcttgataatccttggcgtaaaccggtcgtagcttgaaatagtcacggagttccacaaaccgtgtttcgcggaccgcttcgaacaatgccacacttaacaaatcatcgttaaaaaaagcttgtggttgcaatggcgcatacagttcatacaccaacttgcggccagttccctcatttttttgatacgtccgcattaaaccaagtgcttccaatttgctgcggctgtcataaaaagcaggtaaatcaacactcaacagatttaacaaagtcgcatgtgtttgaaaatgttgttccgtttctttcttggtttgactccataacaaaagatagagactgtaagcaacagcccccatcaatggttgatataagtaagtgacgactgtttgatcgaaatcggtcaaatagttagcttttgtcactgaaaagccgtcttttggactcaaaaaatcaaatgcatctgacatcggctaacccctcttccttaattcgatttcttcgtcttttctttattcatcatttcttgtaattcactcataaagacattcatatccttgaattcgcgataaacactggcaaagcgaatgtaggcaatctgatcaatatctggtaacaagcgcatcacgtattctccgacggcttgtgaagagacttcgttttcacccaatgagcgaatcttattctcaacttcatcaactacttcagtcatttgctccattgtaacggggcgtttttcagcagcacgaattagcccgcgcaataatttatcacggttgaattcttcgcgcgttccgtttttcttgattaccaacaatggggtttgttccactcgttcgaacgttgtaaaccggaaacgacaattctcacactcacggcgacgacgaatcactcgcccttcatccgtgggacgactatcaattacccgcgaactattctgatgacaatgtggacatagcataatgacaccttcttatcttttgattaattcgtttcaaattcaatccaattttaaaacaattagtataacagtagtataacatgccaggcaagcaggctaaacaaaaaatgtatcagtctcaaggcatttcgccttttccaaacaaaaaagcggtcgaacagaataatctgttcgaccgcttgtattacttgttatgacacaactgttgtaacaacgccaaaacacgttgccgcaacattgcaggtgtgccttgattatcaatcacgaaatccgctcgcgcttttttggtcgccaaatcactttgactatcaattcgcgcatttgcctgttctatagtcaattggttacgcgccatcaaacgttgcaattgtgttttacgttcaacgtagacaactgcaacaccatcgcaatattgctcgtagtgttgttcatataacagtggcacatccaacacaaccagcggtgcatctgctgcttgcatctgttgtttaatggctgtcaaaatagcgggcccagtaatcgcatttaactgagtcaaagcctctgggttaccgaagacttgctggcccaacataggccgatcaacttgaccatttttgacaactgcttcgccaaaggctgcttgcaattgtgtctgtaccgatttattagtcgctaatacctgatgagcaacttgatcagcatcaatcaccgggattccctgttctttaaacaatgccgcaacagtcgacttcccactggcaatgccacccgttaaacctagaaaatacgtcattgaaccgcttctctcttaatctgacaccgcggacagaaatgcgtgccacgctgtgctactttaattttctcaatcggagtctggcaccgatcacacggttgccctttcttaccatagacgtgcaacatatcctgaaaggccccagcgtgacccgccgcgtttaagaacgtattgactgttgtcccaccgttattggttgccagttctaactctgtgatgatttcatcatgcaaacgatctgtttcagctttcgtcaataaattcgccggtgtttctgggtgaatctggctcaaccacaacgtttcgtccacatagatattcccaaggcccgttacaattttttgatccagcaacagtggtttaatcgcttttttatgtttctgtaacgcctgatagaaggcggttttcttaaacgttgttggggttggttcaacccctaagtccttcaatccagaaacagtgttttcttgacccgtttcaattaataacattcggccaaacttacgtgaatcaagataacgtaactgttgtccatctgtaaatgtccaaatcacatgcgtgtgcttagtcattggtacggattgatcatcaacttcgtatttgccttccatccgcaaatgactcacaacagttaagttttgatcgaaacgaatcaataaatacttaccgcgtcgatcaacaccgataatttggcgtccaacaagaccttcaacaaaaacatcgtctggattactgataattttcgaccagcgaatctcaattgcttgaaccgtcttaccgaccactaattgttccaatccgcggcgcacattttcaacttctggtaattctggcattgtgtgtccccttatttcttaatatcgtaccaagttggtccaaagccactttcaactttcagaggcaccgctaatgaaaccgcagaatccatgacatttggtactaatttttctaacattggtatttctgattctggtgcttcaaaaatcaattcatcatgtacttgtaaaagcatcttggcttgtaatcctgccttcttcagttccgcttgcatcaagatcattgccatcttaataatatcagcggcactcccttgaattggggtattcattgccgtgcgttctgcaaatgagcgcaaattgaagtttttagcgtgaatatctggtaaatagcgacgccgatggaagagcgtttcaacgtagccttcttcgcgcgccttcttcacgatatcttgcatgaattgatgaacacctggatactgttcaaaatacgcttcaataaagcgtttagcttcagcccttgtgatcccaatattttgtgataagccatagtcactaatcccgtaaacaatcccgaaattagttgctttcgcttggcgccgcatatctggtgtcacttcatcagcgctcgataagccaaaaatcttcatcgcagtattcgcatggatatcgcggtcttccttgaatgcctcttgcatattggcatcccccgaaatgtgggctaaaactcgtaattcaatttgggagtaatcagaagcaaacatctgccaacccggttgacttggaacaaacgcttggcgaatcttacggccttccgctagacggactggaatattttgtaagttgggatcaaccgatgacaagcgaccagtctgcgttaaggtttgcaagtaacgcgtatgcaccttattatcttgatgaattgacttcaataatccttcgacatacgttgactgaatcttagcgatttggcgataatccaagatggtttggacaattggtgcgtcttttttaagttgttccaagacatccaccgccgttgaatagccggtcttggtcttcttaatcactggtaaccccatcttttcgaatagaatgacgcccagttgcttaggcgaattgatgttaaacgtttcgccagcttccgcataaatcttttcttccaaaatcttcagcgtttgactgaactcgccccccatttgttgtaggcgacttgcatcaactcgaatcccggtgatttccatatccgctaaaactagcgctaatggcaattccatatccgtgaataaatcgaattgttgatgtttttttaattgttctgtcaattgtggtgctaatttgtaaatagctgctgctttttgaatcagatgttgataaagcacggttggatcgacaggggctgcgcgtttagcccccttgccataaacagcttcatctgtttggacattttgatactgatgtaaatttgcaaccgttccaagatcattactgttattcgttgtattcaacaaataagacgctaatagtaagtcaaattgaacccccgctaagtgaatccctaagcgattcaccgcaacctgattgcgtttcacgtcaaaaactgctttcggacgtttagcatcttctaaccacgtttttaaaaccgattctgtcaagagtgttgcgtcgtcgctgacataccagtggtctggtcggccaatgtaaaagccaatcaagtctgctgtatggtaattgtcggttaacatttcgatgccaaacgcaacgttttcagtggttgtcacgacatcggcgatgttatcaagggttaatactgtaaattgatagtcttcagtagccgtgggttcaactggtgcaacatctaattgatttagaaacgacttgaagttcatttcttggtaaaaagcaaccaaagctgccatatcaggtccgttgtacaccacatcgtctaagccaatcgtaattggcgcgtcacgtttaatggttgccagtgtcttactcgtgaaagctaggtcgcgatcttcaatcaaatgttctttcaatttactctttttcatttcatcgacatgttcatagacaccttcaatgtttccaaattccgtaatcaatttaagcgcagtcttttccccgacctttgtcaccccgggataattatcagaggtatcgcccatcaatccttttaaatcgataatttggcttggttctaaaccgagtttttcttgaacgtgttcaggggtatacgcttcaatttcattgacccctttaacagtgatgttaacggttgtctgactagtcgtcaattgagttaaatcgcgatcaccagtgacgatatcgaccgtgaaaccatcagcttctgcttgtttagcaagtgtaccaatgatatcgtccgcttcgaaattagcgagttcataagactgaataccatatgctgttaagagttctctaatataaggaaattgttccgttaattcaggtggcgtttttgaacggccccctttgtagtcggcaaattgttcggttctaaaagtggttttgcccgcatcaaaagcaactaacacgtgtgttggttcaatctttttcagaataatatccaacatattcttgaaagcataaatcgcattagtgtgcagtcctgcctgattggtgaaatggtctaaagcttggtgcattgcaaaaaaagcacgaaatgcaacactattgccgtcgactaataataattttttttgagaacccatgttgttcctcctacattcgtaaagtgactagctctattctaacaaagaaagtgacgcgcgtcattatgcgcgaccgttgctaatcgcgacgaattgtcaacttaagtgcaactttttacccatgaagacttctgatggcgtcttccagcctaagaccttgcgtggtcgattattcagttgttcaatgtaagtctcaatttcctggtcgctctgaaggtctaggtctgtgttcttgggaaagtattctctaatcagtccgttggtgttttcgttagttcctcgttgttgaggcgcgtgtgggtcaggaaagaagacctttgtattcagacgttctgccagctccctgtaccgggcaaactcccttccacggtcaggagtcactgttcttactcggttagctggtaaggcaccaagcagctcaatcatgacgtctctaacagtgtcagcttttgcgttggccgttcgcttcgaaagcagatagcgtgatttacggtcaactaatgttactaatgcagagtgtcctgttttaccgcgtactgtatcgccttcccagtgaccaaaccagctgcgattttctgccgaccggggtcggtcgtgaattgatggcacgtcattgaagcgcccccggcgttcatttatggtgcctttgattttgcgcgtcttgcctcggtgtcgaagcagccttggtagcccgcgagcaccatggctcttcaatggaacgccgagattatctaggtagatacctctgtagatagtcgaatagctgatgcgaataggactgccttctagtgacaagcgaccggcaatctgctcaggcgaccaatgtagcaccgtgatatatcgaatgacagcgtcacgagtccccggtcgatcgaggatccgaggacgcctgctagccaagcgaacccgccggtagcggtcctgagcggtggctgccgaatagctccgccagccgccgttacgtgcaatttcacggctgactgtactcttggaacgacctatctctttggcgatggtatcaagagttttgcctgtagagataccaagcagtatcgattcacggtcttttaaggtaagatgggtgtacggactcatagtcgagttctccttgtagttggtcttgtggtgattccattttacaaggactcaggctatgagtcttttctatttgactaatttgttgcacttgaattgtaaatccgtcgcacaaaaaaaggccgcaacaaatggttgtggccttttttaacgtttattttgcttctgggcgatccatgttcattgatgccatgcgaccaaagatttttttgctttggtcgattgttgcgccaacagtatcttggccgatttcattttgtaaatctttgtacaagtctacgtaatagaacaagagatgacgataaacttccaaacccttttccgtcaaatgaacacgacgaatgcgttggtcattttcatcagattgttctgcgataaaagccatcttacgtaatgaacgacattgacgtgaaatcgctgaacgactcacttgcatcttatctgccaatgcactgttagttgtttcattattcgcattttgaatctcgtgcatcactaaaaattggtcgaaagataaaccgtatttttggctttcacgactcattgattcgctaaggttgttaatcaaccaccggtataaacctgcgaattccataaaatctgctgatgtgctaccgagtaaatcggtgttattactcgtatccatttctattcctcctacatgctgaaactttcagtatcaatagttaaccatcgataagtttcatactcacactattcagtacttcaattcttccgtgttctaagatagccgatctaaataatacttagtcagctaatcttaaccgtacttcgatttaaagcaatataaatagtctatagtattaaattatatatttcaactaactttcactaataatcatcaacaacgttcattatgagttgccctgacaacctttattaaatataatttattatttattttaccaaaacaatccacgaagtaaaaaatacagcctcaaaaaaggctgtatttaaaattacttaataattgtgattgtaatatgacgacgaccccaactcttacatgccgcaacagttggaaaatgaacatcaataatgtgacctttaatcgcgctacccatgtcaccagcaattgcatacccgtaaccaggtaccaaaacaagtgagcctaatggaatgacactaggatcaacggcgatacaatttgggtttttagttaaatcaattccagttgcaccaaaatggctcaaaccaggttcggcagttgaataagccgttgcttgcacttgaatcgcttgtccggccttgccatcagcagcgcttgctaaatcggcttgctgggcatttgtgtccacaactggtgcaattggcgcttgtgttgcttcgtcggccgcttttttagctgcttcagccgctttggcttcagcttcttcacgtgcttgttcttctgctttttctttagcaatttttgcaagatccgcttggctttgacttaaattattctttaagccagccacttgttgttccagttcgacagattgttgatccaaactgcttcgttgttcatcaagttctgtcttgctagcttgtaacttatcttgaatggcttgtgtatcacggtaactctgtgctaattcatccatattatggttgtcagcactttgaagaaccgtcaatgtgtaagcccggttgaagaaatcactcaaagaatcagctgacaatagtgcgttgacaacgttgcggtcatcggctgttcgttgaagtgattgcaagcgttccttagcatagcttttacgttttgctaaagtggcttgttgctttttcaaaagcgtttgtgcttgttcgatatttttttcgttatccttaatcttttcctttaaggcattaatttcttgatacttcgcattcacgctcgttaaagtggcttgaatcttcgaatttgtatcatcaatacttttttgggtactgctttcttgggcttgtaattcgctcaaactggcagcactaacagatgtgcccatcgtaaccattgcaactaaacaggtaacaacagctaacgctagttttctaaatcgcatcttgttaaactcctccattcataactcagacttgattatacgcaacaatccccgcaagaagattgcagattaatgacgttatattacagtttgaagacatttataatttttgtgtaataaaaacccacttgtaaccgccgacaaaccaaatacttccaatagaaaaagctaccacaaaagtaaattttgtgatagctttttgactttatacttagattttaattaaaggactaacctttaatccgaactgcgcgggccatttcacgatcttgttcttttcgtttcagtgtttcgcgcttatcgtattcccgtttcccttcaccaacgccgattaaaactttggcaaagccgtgtttcaaataaacccgtaacggcacaatcgtaatccccttattcttcgttaaagcaccaatcttggtaatttccttcttgtgcaacaatagcttccggttgcgcaatgggtcatgattaaactgattgccttgttcataagggctgatatggacattttcgagataggcttctcctttacggacgcgggcgaacccatcacgtaagttgattttgcccttacggaccgatttaatctcggtaccagtgagcactaagcctgcttcgaatgtttccaaaatattataatcgtgaccagcttttttattctgtgcaattaaatttgctggtttttgaggatgtttctttgccattcaatcacctactttttaaaagtacgtttttgtgagtccttgttcgcagctgggcgtcttggatgattgtttttcttttgatcaccacgacgttgaccgcctttttcatgatcacgtgggcgtgctggacgttttggtcgtgcttcaatcttgcttaagatttcagccgaagccaatggcacttcttcaccggctaataattcaaagtccactgagtgggcatctaaatcaacattcgcgaccttgacccgtactggttggccaatgcggaacatcttatgcgttctttcaccgacaagggctaattggctttcaacaaagctatagtagtcatctttcatctgtgagatgtggacgaggccttcaaccgtgcttggtaatgcgataaacatcccaaagctggtaacagaactaatcacagcgtcgtattcattaccgaccttatcaagcatgtattcagccttcttaagatcaacgacttcccgttcagtatcgattgagcgacgttcttcaagggatgtttgttctgcgattggttgtaacttaggtgcccatttttctttttcttcaatcgtcatcccatttgtggcataactatgaatcaaacgatgaaccatcaaatcagggtaacgacggattggagacgtgaaatgcgtgtagaattccgcacccaaaccaaagtgaccaagggattcatcagaataatgtgcttgttgcatacttcttaataacatcgttgtaataatcggttgttcaggttgaccttcaatttgcgtcaagacttcttggagcatcattggcgtcactttcttacttgaaccgtgtgcttgaatcccataagccgtgataaattcaaagaaattcttcatcttatcagcatctggtgtttcatgaatccggtataagaaaggtgcattagcagtactgtaatgttctgcaaccgtttcattagcagccaacataaatgattcaatcatgcgttctgaaagaccgcgttggcgtaattcgatgtcgatggccttgccattttcatcaacgataatcttagcttcgtcttcttcgaaatcaattgcaccacggttatgacgcttcttcaagagaatttcatgtaattctgacatcgtttcaaacattggcacgagccgttcgtattgcgcccgtaagtcagcatcttgatctgttaagatcttattgacgtttttgtatgtcatccgcgctgttgacttaatcacacttgggaaaatcttgtgatccactaccacgccgtgttcattgatttccatttcacacgttaaagcaaggcgttcaacgtctggatttaatgagcaaatcccgtttgataagcggaatggcaacattggaatcacgcgatcagttaaataagtactagtcccacgttctaaggcttcaacgtctaatggtgaaccttcagtgacgtagtaactcacgtcagcaatgtggacccctaagtagtagttgccgtttgccaactttttaacgttaactgcatcatcaaaatctttagaatcgtcgccgtcaattgtcacaacgtcttgatccgttaaatctttacgacctagtttatcagattctaaaaccgtatctggaatcgcttctgattgaagccgaacttcttctgggaagtccgtcttaatatcatgttgatacacgattgataaaacgtcaacgccgggatcattcttgttaccaagtacttgtttggcaatccccagcatttgacctggcgcctcaacacttgggtaaccggtaacgtcaacttggaccatgtcacccttttgtggatgtaacccattatccgttaaataaattcggtaattacttaattttttggcatgactttggatgtatccaatccagcctgttttttctttttggatatctgaataaggcatgaattcgccgacgatttcttcaatcccccgcgtaatcactttcgccacttttccttcaggaccgcgacggctgttttcttcggcttctttaatgatggccacttcaaccgtgtcaccattcatcgcaaaattcgtattgggtggggcgataaagatatctggatcattaggttccttatcaacgattgaaacgaagccaaagccacgatcgttagcatggaagaccccttcaacaaggcggttgctggctggtaatctgaacttaccggcatcgtccatattcaatgtcttatccccttctaattctgctaatactttcactaggtctttgaacccttgtgaaccggcaacgccgattcgttcactaatttcggatacgtttaattgttgcgttgcatctgcttcaaaaattgcaagaatcgctgctttcatctgttcaacttgtgtcacatcaacacctctttctcatttcttaaaacggtttataaattctaggacatctgtttctaattggtgatgcgcactatcgaccgtaatgacgtggccggcttgtggataccaatgataatcaactgttatgttttgttgcgttaattgctggtgtaagacttgggcttgcgttggatcaataacttgatcttgtccgccttggccgatgaagaccggtttatctccgatttgcttcaagtcagccacaacttgtcgactgaaaatatcaattgatgcaagttgttgtggtaattgctgattaatagtcgccaaacgtgctgtctgttgcgcagctgggacgcccattaactgcatgattcgattagcatattggccaaagagcggcgtcaatttagcagtcggtccttcgagtactggcgcactaaaaatcccaccaccacaaacttgtggtagttcttctaatgcccgcatggcaaacaacccgcctaatgacaatccgaaaacaaataacggttgtttgttagccgcggataactgctcaatcgcagccaccgtatcggcccaccatgcatcgacagaaccgcgcgttaaaatctcggttggatcagccgttgcatgccctgcaaactgtggtgcactaaccgccagctgatttttctccaaaaagcggcccatcatacggacatcattagcactacctgtataagcatgtaacaacacaaccccgactgaaccaccgtcaaaataaaacggttgcggcaaccgataagacacgcgctcacccccaaagtccttactgcttgaattcatttaaaaaggtctcctgccattcaacaggagaccgcatcaacgttcttattagaattcgacccgtctcacatgtattagtgtgatgataagtacactaaagctaatgcaaagacgaagaataaagcccctaaaacaacggttactttctgcatgaaagcttcgaaaccacgggccttttgcttgccaaataaatcaccagaaccacctgataacgcactcaaagcatcctgttgtttacttggttgcatcatgactgcgatcacaatcaagattgaatcgattaataataagttcaggataagattttccaacctaattccctacctttctatctacactgtcttttaatactttagcataaaaagtagttaatcaccacttttttatcgattatttcacgagattctcatccgtatttcgcaaggcttgggcagcgtcttcaatttgccgccgcaccgtcgcccgtagctgatgatccgttaacacaatcaacgtgtcaccagcacggatcaacgtatcaccatgcggaatcagttcggattcgccacgaacaatcgcgattaacaaacatgtctttggccagtccacttcacggacttggcgatcctctaacggtgcgcccgcaaacactggtacctccaagcgatcagagaatgttgctaacttacgatgtggtttgccaagtgcgcgttgcaataatgatgcgtaaattggcgcgccccccattaagtcaacgacgatgtaggccaccaacgataaaattgctaatggcatcaagtgcacgagcgaacctaccatctcggtcactagtagaatggccgtaaatggcgccttcccgattccggcaaagtaaccacccatcgcaaaaataattaagttgggaacataaactggtgctaaccaaccaagttgaaccattatgagtccataaagggcaccgattaaagctccttgtgataaaatcggtagaaaaatcccaccaggtaatcctgaaccgtatgaaatcattgaaaaaacaaaccgtaataggaatagaccggccaccacactgattgtcggtaaattttgtccaaggtgtgcaatcaatccattgccaccacccaaaatttcgggccagaaataaccaatcggcaaaacacataataatggcactaatccggtatacgcttttggcagcgggagcttcgcataaagttgtggtaactacaataataccttctgataaacgtatcccaacagtcctaatacgacaccaagtatcaacaaatgccaatactgattaattggcaaactttgggagtacgtaatatgtaatgtcggtgtcaaaccaaaaaaatttaatgaaatgaagttcgctgcaattgcgctagcaagcgacgtcacccaaactaacggtgaaaagttatggtagatttcttctagtacgaaaaaggtcccggcaattggtgcattaaacgcagccgataagcccgcggcagccccactagcgattaaaatccgacgatcagcaccgcgatttaccaacttagcggcgaccccctgtccaacggcagcccccagctgaatcgatgggccttctcgtcccaagaataagccaggtgcaatacttaaaatgcccccaacaaatttacgccacaggattgaccaccaattgaaatcaaactcaccttccaattgtccttcaacttgtggaatccccgaaccacttatattcggttccttttttaataattgtgccacaagcaggccgatcaataaattggcaccaaccaatggcacccaataccacgggtgtgcatttaacccttgatagatagtgataacaaaggccagtcctttttcaatcgctaagcgaaataaactgaccaccaatccagtgaacgccccaactaataaccctttgcccacaaagcgaaaccgtgtcttattaaactgactagcacgtctaagtcgtccattttccacgtttgcctaacctccatctgataatgctttatatacagactaccacggaaatggggattatcaaatgttgaaaccaaataaaaaggcgagcactattgctcagcctttcattgatagatatcaattttgtatttcaatttaatttcataaaaaagcctttagattagtttatctggtttcgctataacccatcaatcagctaccaacgttttaacttgataggtaccgctattgtgcataacgtttacccgatacgttttacccgaaactgttaaacgcattggtgtaaagacattgccgcttaattctccctcaaaggcctggccaaacactattgtccctatgctgtggtcttcttccatgacaagaatcgtatattttttaaataggtcatttgcaaaagtcaccatcattttggcatctttaagcgttacatccgcaataagcgcattcaagaataactgttgtgcctccttcatttttttcgctagcgcttctttgctgtcttgtggtaactgatttacttgctgccatgctcgatctaacacttcttgcgtcacatttggtttcaacttaccgtcctgttcaaataaatccgatactaactttctagcaacaagcaccgattggctaatcactttcactagataagtgccatgcggtaaagtcaccgctatcgagatcgcagtggcatctttttggtttggaataatcaattgatttccttcaacacgaccaacattcggcttaccattcgttacttgagcaatcgtatgtgtatctgcttgaacttttaaatcgtcatattccttaagttttccatcagcaaatgtcaccacaagttctgattctgaattcagttcaatttcaccaactaatacgtctaaatatctttgttggagctttttaaccatctccattaattcttctttatcagtattaggttgtagtgcatcaacctgtcggcgtagattgtttaatttatcttgcgttagaatcgtctcgattggttttgttgtgtttaaatagttttccaattgttccctaagcgaagtcccactgatcgattgattaaaccgattataagtcccattggcattttgttgttcaatgataatcatatcggttacatcaagtggttcatcaatctgccaaatatcattaataactatcccattagctggtttcttatcagccaactccgcgatcaccttgccatttttcttaacaattaatttctgatccttaaagatattaatttgatagtttgttaagtcaactttaatcccttgtttactgagcgacacagccttcattaagctcattggcaattgttttttagtttgattgtcatttaaccaaattgggtcagccaacgttgtgtagttgctgattttcttctgtacttcttcagaaactttaaatccccattgttcataataagggagcatattatagcccgttacttcagagacatgtaacaaaaaatgctgcattcgatcttcatttgaatcataggctaactgattttcgcgataatactgatgtaagatcgggtagaaatcatcgccaaaggtgtttgctagttgggcaaacattgtcattttgacaaagtccccttgttgattgaagtttttatgatcagaatttagataggcgtacatttctggataatacttatctaaatcaggcatcgcacccgtcatttctttttgcgctgctaacgaataaatattaacactcgattcgacaacttctctccatgtccatggtttttgttgtctctgatgaccactttcatgccagatttcccaaggatcctgaagttctaataaacttttcatagctgcatcgtctttaaaacccatgtattcgtttgtcgcatacatataatacgatggcgattctaagaaatgttgtaaatggcgatctgaaaagttaaccggccgaccttcattactgatccctgaaactcgatcttgagcgaccaggaatcggtcataattagccattaacgctttgggatcccccaaatatttctttgccatctcataactcacagtaattaaagcacgatcactaacaagttgaacatcttttgcgtctgtcatttcagtcatttgtttcttaaaatcttcgacactcgtcttgtttgcatcaaagaacggcatttcaccagtggcatcaaagattgacaccctagtaccgcctgaatcatttggattcgtcacataaatagggccatcattttcaactgtaatagtcgtcaccccatttacgagcggatatcgtttctgaacatctcgctcaggcgagccaatcgtcagagacatcaagtcttgacccgttttgctcaccgtcagcacgtccccttttttggcgtataatccggaaggctctaagcttgaataactcaaggccctttgttgccgagccaattctttattaacatcaccgcggccaatatacagttttgaatatggcgccttttctgaacgtgttacacccttctggtgcctcaccttaggttggaggctatcatcaagcacctcactttgcttactttggtaattagaactggtcgtagcccttgcttcttgtaaaatactcatgcaactggtcgttaaaatgccgaacgctaaaatacctactacttttttgatagtctcatctcctaaaaaattatttttggaacacatttaacttaacacgcttcatcaactccgtctataataaacagataattgtttccataaatattatcgacacataaaatccatattactgcgataaacaattagaccgataagcatacaacacgtattatacaaataataaaaagcattcttcccgctataccaaaccaatgaaaaagtcgtctaaattcgtattttaatccccattataaatcattatttttttaatattccaagaaataaaacacgtcaaaaaggccaacgctaagaatttaacgttggctttttaaaaatgatttattttatagttgcgtactaaaaaaatctgtaattatgttcatcagcgctggcttcaccagatggcgttcaccatttgctgttaaaaatgtcacgtttttggcataagtttgacctttaatctgctgttcaaaagctgctacttgttcatagggaattcgttcatctgctgtcccatgccagaataaaacaggccgttgagcaattgcctgcggctgttcagttaaatcgtaggccgttaaccaacttgtcaataaccctagatcgtcaggttgtgctaactgatgcgcacggatattttcacgaactaagcgcgcataggctagcggtgccggcgagcccatgatacaagccgccactttaatttctggatgcttggttaagagtgccgccgttgtcatcccacccatggaaacacccccgacgccgatgcggtcagcttgaattaaattaagttggtgccagtaatcaacaatcaaactgaattcggcaaggttggtttgaatactttgccaaaaagtccatgacggaatctctgaaacaggttgcagccgttcaccatgattcagtgcatccggtaataccacgcgcatcccagcttcagccagtttacgcgcttgcgttaaaaccaattcttttgctgaccgccagccatgatagtaaatcacgagtggtaatggctgatgacgttgttcgtcagcgaccacttccaaaaccggaatccctttaatctggcgttttaagactaataccattagtgaaccctcccccactatttcaagattactataacggaagttggcggggttgtcatcgaattagaatttttcgaaaaataaaaaagccaccagattgatttaatcgggtggcttaaatgtgctttttgaaactgacctttccggttaacctaaaaatagcggttatggctaaaacccgccataatcgctatttttttgttaatcctcaaggtcaaaccgtttcaaaggcactctgtttttaaacatgctttttaaagctgactcttgtgctttgctacatatcgcaaacaatcgactgcgtcgcttattcacgatattaggcaaatgctcagagtcaaaccgctttaaacgcactctacattgcttttggtgcttgtacgcctaataagtctagtgaggcttctaggactgtgctgacactcttcactaatgaaagacgcgcatttttttgatcgtcgtctgccaaaatttttgagtttgcgtaatacttgttgaaggcttttgccaagcgtaatgcgtatttggcaatcactgatggttcgtattcttggctggctttgacaatcacatctgggaagttgccgagcatcttcaagacatcccaagcgttggcatctgaaacgactaagtcagcgtccattgcgacttcttggttggccttgcgcaagatactttgggcacgggcatttgtgtattgcacgtatggacctgtctcaccttcgaaacgcacaacttcttctaagtcaaagtcaaaattatctaaacgatcattcttcaaatcatggaaaataaccgcaccgatgccgacttgttttgcaacttcttctttgtttggtaaatcagggtttttggcttcaatttgttgttgtgctaggttaacggcgtcatttaaaacttcttccaataagatcacacgaccgctacgcgttgataatttcttaccaccttgagtaattaagccgaatggaatatggtgaatttcgtccgaccaatcgttgcccatttcttttaaaacggccttcatttggttgaaatgttcccgttgttcgccaccaacaacgtacaatgattgcacgaagtcgtatgtgtcatgccgatacatcgcagcggctaaatcacgtgtcatgtagagtgttgcgccgtctgattttttaatcaaggctgggttcaagttgtaagctgttaagtcgacgatttcagcaccgcgactttcttgtaagagcccttttgcttcaagtgcgttgaccacaccgtccatcttgtcgttatagaaggcttcaccattaaatgagtcgaattcgacccctaacatcgtatagatcttttggaattcctttaatgattcagttctaaaccatgaccataacttcgttgcttcttcatccccggcttcaagcttacggaaccatgcccgtgcttcatcgtctaattctggatgttcaacgtcttcttgatggaacttaacgtaatatttcaaaaggttcgtgattgggtcttctttaacttcttcttcactcccccattttttataagctacgattaatttaccgaattgagtaccccagtcacccaagtgattgattttaattgggttgaagcccacttttgtcaaaattttggcgattgagttcccaatcactgttgaccgtaaatggcccattgagatgggtttagcgatgttgggtgatgacatgtcgattggcacgttgccccctttaccgaggtcactttggccgtaattagcggcttgcgttaagacggttttgaggatttggtcgctaaacgtagccttatccaagaagaagttgatgtatggcccgttggcaatcactttttcaaagccggcttgatccatttctgcgactaagtcttgggcgatttgttggggtgctttccgtaatgttttcgctaagataaacgttggaaaagcatagtcccctaagtctgatgtttttggtgtttcaatgagttgtgctactttatctgctggtaaactgtcccctaaaacgcccattaaggcagtggtgacttgttgtttaaaatccatgttgatagcctcctaatatttgtgaacaaaaaaagtcccttccaaataaatgaaagagacgagaattcccgcggtaccactctgattgatcaatcgatccactcaatagtatgcaattgttcaaccaaaagcgcgccgcgtcaacttgattacccaccttacaccgtctgtgagctcgctataaatcgctgttgatgctattcttttgactgttcgaacttgataattagtatatagaacttagctgcacttttcaagcgcaattattctgccgcgagggcttcaattggatctaacttagctgccttacgagaaggtgctagtgccgctaagagactgatgataatgctgatgattatcccgaataggacgtagccactggtaattgccacaattggcatatgcgttaatggttgggccaacgtattgacaagcaattgtccaaggccagcaatgccggcaccaagaacacttgataataacccaatcaagaaggcttctgagacgaataagtgccgaatatctttctttcgggcgccgattgcgcgtagaatcccgatttccttcgtccgttctgacacactgatgtagagcaccacgatgatcatgattgctgaaaccaataatgaaatcccggcaatcccagctaagacgtagaaggctaacatcaagtaagtgttaattgaatcgaggatcgcaccaacccctgtgatttggtaatccttttgtgtcttaccgttgactttgctagtgtaggttttgattttattttgaacggctttaacattttgggtcttattaaccgtgactgctgcaaagttgggtgcaaactctaatccttgcgcttggtacatcttggctaatgtgccatatgtgacggcttcagtcccagaattgatgatccctgaaactttcacatcttggcgcatttgaactggacgttgatccttactaatggcattgacgtaaatggttactgtccgaccaaccatcttcttgtaatttttatctaacttcttagccattgccttcgttaaaataatttcgttggccccaggtttagtcccggtcttaatatcttggacacgttcggttttattaaacgtttggaacatttggactgtttcactcttcttttgatagtgcacttggacaccattcatatagtagcccttttcaaccttcgtcacgtttttgaccttattaaggcggttgatatccttatcagctaagttaccttgttcaccggcttcaatctgtttgcgcgtgaggtttcttgcaatctgaatcgtatttggattaacttgcgatgaaatctgatcattaatatagccagtcaccccttgacccaagcctagcattaaaatgacggagaaaatcccaatggacgcgccaaaaataatgagcaaattccgtttaatatcgtagcgcatgtgttgcattgccattttgaaagcagacataaaacttaatggactactcttcttaattaccggaccagttggagctgggtaagctggttttaattgcttgtcataatcaatctgcccatcaaccatgtggacaacccgtgttccgtggtcagcaacggcttgtgaatgggttacggcgatgacgagtttgccatcttcggcaatcttttgtaagatttcgagaatctcggccgtattctggctatctaacgcacccgttggttcatcggcaatgatgacatctggatcagcagccaaggctctggcaatagcaacccgttgcttttgtccacctgacaattggttgggatgtttatggatatgttccttcaagccaacttgttccaataaggcggtcgctttggcaacccgttccttatgtgatagatcagtcatttcaagtgacaccatcacattttccaagttagtcaaatgactaattaaattaaagctctggaaaataaagccaatcgtttgactccgataagcatcaaatttcttttcggatgcattctttaaagatgtcccatcaacgatgagctccccatcgtagtggtgatctaacccaccgatgatgttcagcaacgtcgatttaccgccgcctgattccccgaggattgaaacaaattcgccacggtcaaagcttaaattgatgccttttaagactttaaattcagccttgttcatataataggacttgtgaatatctttaatctctaataatgtcaatgtcgtacgctcccactacttagattgctcgtaagtgtcacgattttttagtcgatagataataaatatactttatcagagcgcctttaaacaaacaatcggccttaggtctgataacgaaaagagtgtgatgtaagtcgggtatccgccgaggattaaatttcagagaataaaaaaagaggttgcaacaaaatttcttctgttgcaacctcttttgcatgaatctttaagcgagtgacgggaatcggacccgcgacgcaagcttgggaagcttgagttttaccactaaactacactcgcattacttgatatagtatagcatattatttccgatttgtgcatattttttgaaaaaaaaaggtttaaacgcttaacaaatagcgtatgtatgcggtatactattgataacaacttgattggagtccttttaatggccgattcgcaaaatacaattcctgaatcaaccgcatttcattgccctgcatgtcaggcgccaattgaatatggtatcaaacgttgcccaggctgtcagactgcgatcttctatcgcgatatgtctgaaacattctggaacgatcgtaaattaaatctttttaaacaaacggatgccattcaacggggcaattgacttaaattaactattcaaccgtcactttttgtgacggtttttttaattgttaataattaattcagaaggcgttaccattgttaatttgatagacttcacgactcattttagccgcatttttaatttgaaaccaacggtgatggttgctataatggcacaccatacacaggaggtctttatgatagagaagaacaaaatgagtttatttagcctagtgatgctaggtttaagttccatcatcggttccggttggctgtttggtgcatgggaggcaacgaccgtggcaggcccagcagccatcatctcttggattgttggcgcaattgtgattggtgcaattgcctttaattacgttgaactcgggacgatgtttcctgaaagtggcgggatgagtcactatgcccaatatagtcacggttcattactcggcttcatcgcagcgtgggccaattgggtatcattagtcacgattatcccaatcgaagccgtcgctgctgtccagtatatgagttcttggccatgggcgtgggctaactggacgaatcactttatgcaccacgctgaaatttcgaatcgtggcttgctcgtcgtctttgcctttatcatcgtcttcacccttttaaatttctggtccgttaaattcttgacccgttttaccagcttcattgcaatctttaaattaggtgtgccattattaaccattattatgttagtctcaactggtttccatactggcaacttcgggcattcaatggcgacgtttatgccctatggttccgccaaaatttttgcagccacttcgatttctgggattatcttttcatacaatgcctttcaaacagtaatcaatgtcggcagtgaaatccgtgattctaaacggaatattggacgtggaattgcaatttcacttgggatcagtattgtgatttatctactcttgcaaattacctttatcggttctgtttcacccgccttgctcgccaaagtcggttggcacggtttaaacttccaatcaccctttgccgacttagccattttacttggaatccattggttagccgtcttactttacttagatgcgtttgtttcaccctttgggaccggcgtttcctttgtcgcttcatgtgcacggacattagcagcattaaagcagaacaaacacatgccaccgattgtcggccgcatgaacgaacaatataatattcctcgcattgcgatggccattaacgccatcgtcagcatgctactcgtttcaatttttagaagttggggaacgttagccagcgtgatttcaaccgcaacgttgattgcctatttaaccggcccggtcaccgtcatgtcattacgtaaaatggcccctgatatgaaccgccctgttcattcaccttggatgaaaatcatgtcgccattatcctttgtccttgccagtttggcaacttactgggcaatgtggccaacaaccattaaggtgattggcgtcattatgcttggcttaccattttatttctactatgagtatcggattcactgggaaaatacttgggcccaattcaaaggaagcttatggttaattatctatctcgcattgctttcgctgatttcattcttgggcagtcgggaattcaacggaattaacctgattccttacccactcgatttcgtcttaattagcgcattagccctcatcttttactattggggaattatcagtcgcttctattcgaaatacttctcacgcgcaacacgaattaacgatgatgtgcaactttaagcatgactaaaaaggacgccaaacaacggttaaagttgtttggcgtccttttggtatctctagattgtttctgctaaaatgaatcgtaaagtacgttatctttttcgggaggcgctaaccaatgcaaaaattgaccgttcaatctactgatcgaatccatactttaaatgtcgtgacttggtttccaatccaaaaaccggtcgcagttgtccaaattctaactgggatggccgaatatatcgaacgttatgatgctttcgctcaattcttagcagatcgtgggattatcgtcatcggacacgatcatattgggcaaggccactccgttcagtccaacgatgagctcggttatttcgggccaaacgggctccagacgctagtcaacgattgtaccttaatcggtcgcattgtccacgaggaatacccagagctaccattatttgtgctcggacactcaatgggctcaatgctagcgacacaatatgttaagcaaactgaagtgccgattactggagccatcttcatgggcgttatcgatgtacccttcattcttaaacccgccttaccaatcgttaaattaatcggcgccattgcagctaagcgccccggtactgtctggaataacttggcgtttggggtctatcctaaacgatttgatgctcaccgacctttttcatggttaagttacaatcaagcaaacgtggcggcctacgaacagcatccattgtgtggctacgtcttttcaaatagcggttttgcaatgctcttcaccctcactgagttaactcggcatgctgattggcaacttgccttacaatcccgcccagttctcgtaatgagtggcgccgacgatccagctggcggttatggtcgccgcgcgcggcatttaacgaaccaattcaaaaagcgcaccgttaacaacgcaacggtgcgcattctacctcatacagcgcatgaaattttattagaaacagatgctacccagcattaccaattcatctacgattggttgactaaagtaatttctgaatctcctttaacacaccatagttctcattagtgtcggcacgataagtcgcatattggatcatatcgtcggcagcattccccatcaaataactatgttcaacggtttgcagcatttctttatcattataagtatccccgaaggccatcatttgcgccggcgtgatgttgaaataatccgccaaaaagcgcattgcatggcctttgtcgatgccttgattcataatatcgatccattcaacaccagcaaccgttactgaataagccggttcaaattcgggtgcgaaaacagcttcatactgtgcttgactatcttttcccgggaaataaatcgtaaacttgttggcttcaacactaacctgcgttaaatcaggtacatattcaatgttggcatagaattgccgcaaagtcgcgtcataatctcgatattgtgtttcaacgtacgccgcgtccatcccacaaatcacgccaatcccatctggcgtttgattaacgaattggaccatccgttggtaatcagctaacggcaataaacttttgaataaagtttcaccttgataaccaattgcacccccgttatcgctgacgtaaaccattgtgtcagcaagttcgggaaacatttgctttaacgtgtacattggtcgaccgctggcagctgcgaattgaacccctttagcatgtaattgctgaatggttggtataaagtttggtggcaactggccactctcagttaataaggtatgatccatatcggatgcgattaatttaattgtcatgcttagttctctcctatcccttagataccttaataatataccgtttatgccaattcatcgcaaccggttacattcaaaaataatcatactcgacatccatcgcttcgatcctgcccattaacacgcgctaaactaaataactcccccgttcagattccgatagtctctctaaaagatttgaatctcattgatattgaatgttcttttaaccgcgtcggacattagcgcaatttggttatcaatttcatcccaattggtagtaacaaatccagaatccaaactatcaatcatgtcattactgtttagtctaatctttaataataactgtttccccttggttgtaagtcgatagtatactttacgactatcaccaataaaactccccacattagcccgttcaattaatcctttttcacccaacgattggcattggcgggaaatagctggtcgagaaacgcccatacaagcagcaaggttgccgggcgtttcttctttttcacgatccattttttccatcaacaaatattgttcgagtgataagtcaacattttgcaaaactgtgacaaataattgatccaaaatattacgatatttaatgagcattaataattgattattcataataagcattactccttctatctattttgaggacctacaatatgcgaactagtaatcctgctctgctccacaggcattatattatataaattaattaaatgtaaatagctgaaattaacggtattgacaaaaaaatatttttaataagttttaaccctattaatatttttttattgaaattcgccaagtttgtgatgtttttatttattaaatgaccttttaatcgcgatgcagtttacagcttgtagctttcagccgtttttatagttcaaataataattatattgataagaaaatatttatttaaagctatcgttttctactaatggtttaattccttaaaattgatgcaacttttttgaatagtgctaataattgtcgctaatccattggctaaaccagtcataatgaggtaaataatcaataatcgatgtactttttgaacaaaaaaagaccgctatctaaagtgatagcgatccttttttaatccataatgcccgtggcaggattcgaaccagtacttggttacccaaacagcgacctgaacgctgcgcgtctgccagttccgccacacgggcgattgtgctacaagactattgtaccagtgttacagagccctgccaatacccatttattaatatttcgcttataataatagttgataagggagggattcagatgcaagtcatcacaaattcaaccgttcgtgcggtcctgcaggcacggcctgccatcagtcataaaggcgattttggccgcgtcttaatcattggtggtagtcagcaatacggcggtgctgcgattatgagtgcctctgcggctgtttatgctggtgctggattagtttccgttgctagtgacttaagtgttctcagcggactgcacgcgcgcttaccagaagccatgttcattgattatcaacaacccttcgtgcagtggtcgtctgcagtccaggctgctgatgtcgttgttgtcggacctggtcttggcattacttcgtttgccgttgaactgctgagaaaaatcttacaaaccatccaaccaacacaaacactgattatcgatggttcagcactatcaatcatcgcacatgaaaaactgacgatcccgaatacgcaactcattttaaccccgcatcaaatggaatgggcgcgcctcagcggcattgcaatcgagcagcaaacggttgctactaatcaagccgcactcgctgcttatccaaacgcgactttagtgcttaaaaaacatcacactgaggtctatcatcagcaacaggttcagcaactaaccatcggtgggccttccatggcaactggcggtagcggcgatacactgactggtattattgccgcattctgtggtcaatttggcacccactatcagacgatttgtgccgctgtttatacccacagtgcgattgctgatgaactcgccaaaacccaatacgtcacacttcctagccaagtgattcagaccttaccacactatatggctaaaatgattcatcaatcttaaaaaaacagcagtccttttgaaagggctgctgtttattaattcgctttaagtaatgcaagttctgcatctgtcaacgcacggtattggccacggtctaaatcatctggcaatgccagtggtcccatcttaagccgttctagcgtcaagacttccttgccgaccgcatgaaacatccgcttcacttgatggaatttaccttcatgaatctcaacggtaatctgactttcttgttgcgcctcatcaacactcagaatttcaagctgtgctggttgtgcagtaaaatcactcaacacgagccccgcttcaaaccgcgcttgatcctctgccgtgacaatcccggcaatcgtggcgcgataaaccttgctgacgtgttttttaggactcaacaaggcatggcttaaatcgccgtcattcgtcaacaataataagccggttgtatctttatccaatcgccccactggaaacagatcatcccgcaagtccgctggtgccaataaatcaagcactgttttctggggatcagtcgtcgccgaaatcacacccgccggtttgttcatcagccaataaaaataggtttgataacgcacgggttcgtcgtcaacatagacaacggtcgcctcgttcactttgaacttcgcatctttgaccacagtcccatcaacgcgcacgcgtcccgctttaaaaagtacctttaattctttgcgtgaagccacattcatatgacttaaaaagcgatcaattctcatttgattctcaactttcttctaaaccgatccaagttactcccaatgacatagtccgctaagcgcgatttaagcaccaatgcggcgtaaacagccacacctaggccaacgctaatcattaagactagaacgctctgaagacggctgtacgggttaaagacaaggtataaccccttgactgcccccgccgttaccaaatacatcaccaatgagaagcctaaaacgccgattaagcgccgaatggttttgcgtaatgcaaagtgataatagcgatgcagtgctgcaatcattaaaaccgaacttgtcgcaaaggctaagccggtcgatactagcgggccatagacacggaaaaaataaatcgctgggtactgcgccacaattttgacgatgaatccgatgaataagtaaaacaatgccaagcggttctgatagaggccttgtaagacagcgcctaaaaccgtaaagaggccgagcataatagaaatgtaagatgaaaattgtaagacactaatcccaagcatatcatgcgcgtagaataacgtgtaaagcggaccggcaaccgccgccatcccaaatgccgctggaatcatcactaagttgaataattgcaaagtactgccgatttgatgttgcaattctttttgattgccccgcacatgcgcagctgacatcaatggaatcgccgtgaccgccatggcagcagcgagtgaaacggtgattgaaatcagtttattcgcattagctgcaaataaagcatacaagttatacaactgatgatcactggcaaccacgaaatcatgcatcatcggattaaacgtgtattggtcgatgatatagaccaagttgacacttgcgtcgattacgatgaatggaattgattggcgcacaatcccttttaacaagtcagtcgttgacacttctaattcgttgttactattggccactaactctgaaatgcgaccgcgttgtttcaaataatagaaaatcagtaataacaagccggcagcagccccaatgaatgcggcaaatgtcgcctgcgtcacagcatccacgtagctgcctttaaacacttgcataatcataaaagcggtcacggtcatgtacagcacgcgggctgcttgttcaataaattgcgaaatcgcagacggcgccatttcggcatagccttggaaaaagccccgcataatactgagcaatggaataatcaatagcggccagcttaatgaccggaagaccggtaccatccgcggatcacccgctgctagaacgggcgctaacgcaaagagtgcgagcgctgataaaacacccattgccaacattaaaatcagcgactttctgaaaagacgctgaccaatgccatactcattcatttcgttatagcgtgcaatttgtttcgatagcgcccctggaatcccagccgtcgagatcactaaaaagacactataaatttggtatccttttgcaaataatgtgttggcttgtaagaaattcgcgccaaaccagattggccacggaattacatagacggcgcccagaattcgcgagaaaatactcccagcggtcatccaagcggagccccgtaacatcttactttgtgaagatctatccgtcgcctttgtttcaggtgaattggtcatttcccataactcccttattaaacgtcaaaaagcatcttcctaccattttagaggattgccccaagccttgcaattcctttaacaaaactttatgaaaaagagtgcttctgatgacggttagcaactgagcattaatacaaaattcccaataatccaggttttaagattattgggaattttagattaagcggaagttgttgtcatcagaagcacgtttcaataagagtgctattagcgcttgcccagattttgagcactaacctaaaaacgggaattatggcgtactcggccatgattcccgttttgtagttaggcgcagaaatctagcgccaatagcacgtttcaaaaaagatccccgccttcgcggagccctctgccatctcattatttagcttgtttactttgttgaatcaaataccacgtcaacagaatgctgacaaaaaccatgataccgccaaagattggtgtactgtctaagccccaagctgccgatgcttgcccgccaactaatgagcctatcgtaatcccgatattaaaggctgagatattcaaagccgaagccaatggaatatcatttggcgtgattttttcagccaactgcacaatgtataattggagccctggaacgttcatgaaggcgaaaaagcccatcaataaaacgttaattaaaccgaaccaatggccatttaacgttaacatgaatagcaacaaggttactaacaagccaacaaacattttcaatagcgccatcaacggttggtgatttgaccatttgccacccaacgtatttccaaaagccaccatcagaccataaataattaagatgatcacaacggcccttggtgaccaacccatttttgattctaaaatcggcgttacaaaggtataaaccttaaacgtcccgccataaccaagcgctgtgattaataaggctaccacaattgctttatttttaaatacgcgaatgatcccgctgaattgactgggttgtcccaatagtaaatcattaggcactaagaaccagttcgcaacaaggcctaagacaccgattgctgcgataaaaataaacgacatgtgccaagttgaaacctgaccgatgaacgttcccagtggtaccccagtcacggtcgccaccgtcaagccggtgaacatcaccgcaatcgcgctagcgcgtcgttctggttcaacaacatcggcggcaaccacggatgcgattgacataaaaatcccatgtgctaatgatgaaataatccgtcccaccaagacgacggcgaagactggcgcaaaagcgaccgtcaagttaccaatgataaagacaaccataatccccaacaataaatttttccgtggccaacgacttgttaaaatcgccaaaatcggtgccccaatcgtaatttccaaagcatacatcgatacggttagtcctgcttgactcatcgtaatcccaaaatccttaatcatcaatggcattaagccgacactgatgaattctgtcgaaccaatcgcaaaagcactgattgccaatgctagtaatgtgaggttcgcccgttgtttactactcatactgccacactcctattagacttttttactgatgtactatattattcaataggagcgtcattttcacaatcacgcactttttagtcagtaggttactgaaaagtaataattgagtcttatcacaatgaaaaggtgaatcaaaattagaaatgaatgagaaaacatataaaattggcgttgaagctacgatggaaattatcggcggtaaatggaaacccgttattctttgtcatttgcgcaaccaaccacggcgatcaagcgagctcttacaacgcatcccaaagatttcccaaaaggtgctcactgcacaattacgcgaactcgaaaacgatggcatcatcaatcgtaaaatttatcaagaaattccgccacgcgttgaatacagcctctctgaatacggtcagtcactcaataaaatcttaaatctcctctgtttatggggcgaagataacattgatcgccgccaaacagcgggtgaatcaatcactgttttacatcgcgatcaaatcaatccaatcgaataaaaaaaagacagccaactaggctgcctttttgcttgtaattatttttgccgaccaaatttcacgaaataaataaccaccatgatcattaagaaaattaaaccaacaatgattgaaatccgcgtttccggattaatgaacatgaagattaaggtgatggctagcatcgccaatgtaatgtagttcgaataaggtgaccaaggcatcttaaatggatgttgtgccatcttgtcagcgtgttgttttctaaaggcaatttggctgatcaaaatgacgaaccatggcaccatccctggtaagacacttgaactataaacgagcacgaagacattgccagcttttggataaacaagtggtaaaatggcgtttaaaatcaccccgattaaaatccctaatgaaatcgccccgaccgcataaaatgggacaccgtggcggtttaatttcaagaatcgttttggtaactgcccattattggctaatgtgaacgtcattcgactggcactgtaaatccctgagttagcacccgataaggctgctgtaatcactacaaagttaatgattgatgctgcagcggtaatcccaattttagcaaaggtttgcacaaacggtgaaccgacctgactcaattcattccaaggataaatgctcaagattacgaaaatcgccccaatatagaaaatcaaaatccgcgcaacagtggattgaattgctttaaccaatgttgattgtggattttcagcctcgccagccgtaatcccaatcaattcaatcccttgatatgatgccaagacaattgccaaggcgaagatgaagcctttaaagccacccgtaaagaagccgtgcgtccacaaattactaatgccgactggatgcatatggtttccaatcccaaaaacaatgagtccaaggcctgccacgatcatcagaataatcgtgacgactttaatcaacgcaaaccagaattccaattcaccaaacatgctgactgaaattaagttggccgcacataagaacgtaatcgcgaccagtcccggtacccagcccggcaagttcggccaccagaattctaagtaaccgccgatggcaatcatttcactcatccccacgacaacgaattggaagacattgctccaagctgttaagtaaccaaaaattggatgcatatattccgttgcaaacttggcaaaggaccccgtatctggatcaacatacagcatttctccaagtgcacgcataatgagatacagcaataaaccagcaatcccatacgcaatcagcacagacggccccgtccatttaattgtcgtgttggcccccataaaaagcccaaccccaattgtcccgccaagtgcaatcatctgcatctgacgggcagttaaatttcgtttcatagtcctcaaacccctctattttagcatcatcattattggttaaccccagaatctaaatttacttatcatcgtataataaaaaacacccaaaagcaatagtcgctctcatctttttatcatcttaaaagcgctttagaataacccttatattaattgaaggataattaggcccctaaatattaattttaaataagaaaaagcagttactgcgagaaacagtaactgcttttttgaaacatgctttttggttgcaacaacttccgcttaatctaaaatttcaaataatcctaaaacctggattatttgaaattttttattaatgctcagttgctaaccgcaaccaaacgcactcttgtctgaaacgtgcttttcaagctaactttctgcgcttatcccagtgaatcaaacaatcgactacgtcgcttattcgcttccctctgataatgctcaaaagttgaccgagcttgaacccactctttttgaaacgcactctaattggcgacgatattgaccaatttatttggaatggcaatcactttgcgcaccgtcttgtcagcaatgaattcagctactttttcatttgccttagccatcgcttctaattcttccttcggtgtgtctttagctactgttactttggcctttaacttaccgttaacttggaagatcacttctacttcgttagcgaccaatgctgctgggtcaaatgttggccagtccacgtaactgattgagtcatcatggccaagcattgcccataattcttccatcatgtgtggtgcaattggcgctaataacttcacgaagccttcagcgtattcacgtggtagtgtgtcaactttataagcatcattgatgaagaccatcaattgtgaaatggccacgttaaagtgcatgctttcgaagtcttctgtcactttcttaacagtttcgttgtaactcttcttcaattgttcatcattttcagcgacaatcttgcttgaaagttggtcgttttcgtcggtatcttcttctgtgtatagacgccatacccggtccaagaatttacgcgcgccggctaagcccttttcactccatgaaatggaagcatctaatgggcccatgaacatttcgtataaacgtaatgtatcagcgccaaagcgatcgacaacatcatcagggttaacaacgttcccttttgatttcgacattttttcgtggttatcgcctaaaatcataccttggttatataggtgttggaatggttccttcgttggcacgaccccgatatcatacaagaacttgtgccagaaacgaacatataataaatgaagcacagcatgttccgcaccaccgatgtacatatcaactggtaaccagtctttcaacttatcaaagtcagccaatttatcagggttcttaggatcgatataacgaaggtaataccatgagctaccagcccattgtggcattgtattcgtttcacgacggcctttgcgcccattttcgtcggttacgtttaaccagtccgctaagttcgcaagtggactttcaccagtccctgaaggcttgatatcacttgttaatggtaattcaagtggtaattgagcttctggcaccactgatgttgtgccatcttcccaatgaataattggaatcggttcaccccagtagcgttgacgtgagaataaccagtcacgcaacttgtagctcacttgttcatgaccagcattatgcgttactaaccaatcaatcatcttgtcgattgctgcttgtttgtctaaaccatcaaggaaatctgaattaatcatcacaccaggttctgtgtgaacagcttcttcaggattaccaccagccacaactggtttcaatggtaaaccaaatttcttcgcaaattcccaatcacgagggtcatgtgcagggacagccatcacagcaccagtcccgtatgaggctagaacgtaatctgaaatccagattggtaaccgttcgccattgactggattaatggcgtaagcacctgtaaaggcccctgttttatctttcgccaaatcagtccgttcaagatcactcttgtgttcgatttcttttaaataagcatcaacagctgctttttgttcaggcgttgtgatatcggccactaatttatgttctggggccatcacgatatagctgacaccaaacattgtgtcggcacgcgtggtgaagacatcaatctgagcgtcgtggttttcaacagcaaatgatacttcagcgccttttgagcggccaatccagttgcgttgcatatccttgacactttcaggccaatcaactaggtctaagtcgtcgattaaacgatcagcataagccgtaatcttcaacatccattgacgcattggtttccggtaaacaggatagccaccgcgttctgttttgccgtcaatgacttcttcgtttgcgacaacggtccctaaatcagggctccagttaacagccacttcagcttcataagctaagcccttttcgtacattttttcaaaaatccattgggtccatttgtagaaatcaggatccgttgtattcacttcacgatcccaatcgtatgagaagcctaatgaattgatttggcgtttgaacgtattaatattggtttgcgtgaaatcagcaggattattcccagtatccaacgcatattgttcagcaggtaagccgaatgcatcccaacccattgggtgcaacacgttgaagccttgcatccgtttcatccgggccaagatatcagttgccgtataaccttcaggatggccaacgtgtaagccttgacctgacggatatgggaacatatctaatgcatagaaatttttcttatttttatcttctgttgttttgaacgatttgtgtgattgccagtaagcttgccacttttgttcaactgcgcgatgatcgtaagtcatatcaaacactcctttttttaacgtgctttcaaaagcatggacacttttgacacactcttttttaattcacttaacgccaataaaaaagtcctatggtataaataccataggacgaattgaccgcgatgccacctaagttctgtccaatctatattggacaactctctggccttaacgcggcagacgtttctatctactatcagttcaatagaaaactcaaaggcgagttcgttatgttaaacgacgtgttcacactaaccacacgctctctaaacgcttaacgataactactaatccttctcaacgttaaataattgttcttagcataccaaactcttacttcaatttcaagacttggccgactaagattaaatcagaatgtaaattgttcgctgattttaattgtgcgatactggtattatttttttgtgcgattgaccaaagactatcgcctgatttaaccgtataagtcttcccagaattcgtgttaggcgtcgttggcgttgtagcgccagccattaattttaagacttgacctgggtagataaagttattcttaatattattagccttgattaattgcgccatcgaaataccgttacggttagcaattccccagacagaatcgccggccttaaccgtataagtcttcccagaagcttgccctggatttgtactatttgtattattgttgtttgaattaccagttgttgcaccttggctaaccactaatttttgaccaggatagataaagttgttccggatattattccatttaaccaagtcagccattgagatgccgtaacggtttgaaattgcccagacagaatcccctgatttaaccgtatacgtcttgtttgaagtctgattaccgttattgctgtttgaattattgttatttgtattgccagttgcggtttttgaaactgttagaacatcgccagggtgaatcatattattcttgatgttattccaactaattaaatcgttcattgaaatcccatatttgttggcaatcgcccaaacagagtcgccggctttaacggtatacttatcaccattagctggtgttgttggattcgttggtgttgtagggtctgttgggtttgtcgtcccaccattgttgttgccagctgcactacttgaaacaatcaagacttggcctgggtgaatcatattgttcttgatgttattccagctaatcaagtcattcattgaaatcccataccgattagcaatcccccaaacagaatcgccggctctaacggtgtattttgtcccattttcaggtgtcgttggagtcgttggcgtggttggagtcgttgttcccccattattgttaccagtattggtccctggcgtgtcatattgcgttaaattgtattgttgaatcaaacggttcaaacttgacgcataattggttgctgttgcataacgtccttgtaagtattgtgtggcttgttgatagctacttgtatggctcttaaatgccccttgataataaggcgttgcaccaaatgaagtattccgtagcacatgcacataatcttgtaacgattggtagtatgaaggatattttctaaatgcagcttggatctgatacatgttcccatgaccatcatcttcccaagtccacatataaacagaactaccattgtaagtcccttttaccccaaacaagttataattaggggcagaacctaaaccactgctcccaaatcctgattctaatgatgcttgggcaatcataacagaggcatacaaatcgttaccacccgctaattgttgagctgaactagcaattgaattgatgaaattttgtgcgcttgaattagctactgccataacaacgccagcggttgcgatattggcactcgtactttgcactccagaaattggttgcgcttgagatggtgccggttgtggcgtagccacctttgtcgcttcattttcagtcaattgaggttttacaacaggttgttgtgttgattgggattcagttgtcgttgtgcttgaactagttgttgatgatgttgcactacttgctgtattagctgttatagcttggtcatcattgtttgcactatttaacacatcttcagtggctgctttggcccgattcgaaaaactaggtgcaattgctgaacccatcaagacggttgcccctgcaaaagtcgtcacattacgaactttcttaattctaatttcccgcttctgcttatgtaagcttaccttttgagctgcaattcgctgttttctagtctctttcaattctaacgcctccgaatttccattattattgtctgtggcacaattaacttgagcttcacctgaactttattataatattaataaatggggaaaacaatcctatcacgcaactacttttattagttgtcttatgcctaataattattgtatcatttaataatcttctttgtctttaattacagcttattttgaaaggatttcttaaaaatgaccaaacgattttcggctagtttattcattcttggcacaatcagttttctaatcattttaatcagcgttgtgcaccatgccacttgggttatacattttgatacccttatcagaactggcatccggtcgctttcctccccattgatggatactgtaagcattgcgattacgtcgatcggcaatccctatagtataatgactttgaccaccattgtaacgcttggtttgctgggctttaaacagtggtcagcagctagctttttagtcattaacatggtccttttttcaacgcttaaccactttattaagatgagcgtccaacgaccacggcccccatttcaccatcttgtctacgcaggcggctacagcttccctagcggtcatgcttcgggggcacttctttttttcggaactttaagcatcctagtttactacttaattcgtcaacgcgtttggcgaaaaatagcgattggcacctgtttaatattggcactatgcatcggccttagtcggatttacgtacttgttcattatccgagtgatgtcttagctggctttttattagcaacggcgtgtctcggcggttcatggtactgttttattcattttaaattattgcatctgaaggagtcctaacacatgatacttgatcatcccactaaatttgcacattttctattagaccaggcaattcggcccggcgatgtcgtaattgatgccaccgtggggcatggcgatgataccttatttttagcagaacgcgttgctgattttggtcaggtttacggtttcgaaattcaaaaagaagccatcgaaacctgcgcggatcgtcttacaaaagcaaaccaagcgaaccaggttactttgcttaatcaaggacacgagcggattatcactgccttaccacccgagttaaaagtgcaagccgctatttttagcttaggcgcactcagtcctgattcttttgaacacgtgacattgcctaacacgacaatctctgcctatcatcaaattctctcacggcttaatcgcggtggcttactggtattcgttgttgatcctcggttcaatgaaactcaagaagaaatcgactatctaatcgccgacttaagtcgcctagaaccaaccaattaccaagtaacccactacaaggcaatcaacgccgaccaaggacaagtcctagcgatagaaaaaatttagagtgcgtcgtaaggcgaatatccgctgaggattaacacagcgtcgtgaatgattacaacgtaatcgtttgcggctcagggttaaccggaagcggatgccttacagagcacgtttagagtgtgatcccagtcgggtatctcttgaggattagcctagactggcgaatgattgctgaaagcaatcgtttgacaatcgtcgctaaccggaaagagatgactgggtgaacacgtttagagtgcgtcgtcagtcgattatctcctatttaaacattaaaaaaaggcccagtcatcattgatgactgggccttttactatcttataatgtcccgaccacttttgtaccgtgtgcttcggaaatttgtaaacgttctgttaacgcgtcgacattgtcggctgtaatgccaccgccaggtaaaatcacaatccgcccatcagcagcttgaattaacgtttttaaacgggcttcgtcgatgggcgcgtctaacggccccccatgcgttaaaatccgtttaacatcatgatcaatcagccattccattgctgcagcttgttgatcagccgcaatttcatcgaaagccatatggaaaacaacttgcatcccattggcagcaccaatcaacatttccatcgcttcttcgtcgatttgattgtcaggtgttaggcaaccaaggacgatgccgtcagcgcctaattcttgcgctgaaaagatatcagcttccataatttttaattcttgatcgttataaacaaagttgccgccacgcggacgaatcatgaccatcactggtacatcgtgttcatgcgcataacgcactgattcagccatcacaccccggctaaccgttgtgcctccgacagccaagttgtcgttcaactcaattcgtttagcaccattgcggattgctgccggaattttagtgaaattttcaacacaaacttctttgattaacatggatgaaccctccaaattttaatttaatcctttatgcaaatagcattgcacctaagacaagtaggcccaagataatccggtaccaaccgaagaccttgaaatcatgtttcttgatgtaatccatcaagaatttgattgaaataattgaaacgatgaatgaaaccaacatcccgactaataaaatgattgattgatcgcccgtaaacgtattgccttggtacaagaatttaccaatcttcaagattgccacgccgaccatcgttggaatcgccatgaagaacgagaattccgcacccacaaaccgtgatgtccctaaaataattgcccctaaaatcgtagcgcctgaacgggatgtcccaggaataattgataaggcttggaaacagccaatccaaaaggccgtcaaccaaggtaacgtatttaaatcagcaaatttcggtgtggtatgcttgttgcgattttcgatgacgatgaacaaaaccccgtataaaatcaacatgctggccacaatccagtttttcatcagatgttcatccatccagtcattcaatgggaatccaataatgactgatggaatcaccgccacaattaccttaaaccataacgtccacgtttgtttttgttcgagctggttcttacgtggtgagaaaggattcaatttatggaagtatagaatcacaaccgccataatcgctccaaattgaatcacataattaaacatatcgatgaatgcttttgattcatcaagtttcaaaacactaccgaccaacactaaatggccggttgaactaattggtagccattctgtaaaaccttcgacaatccctaaaatgattgtcttaatcatatttaaagttaacacaatactaatccctccgtaatccataatcgtttattagtatactcattctaaagttagattgcgactcaaattgaaagcttaatcaaattttattcaattcgcccgcaggaaaagccaaatgacgttgatccatcactgcttgaaaatcggctggtagttcgctttgaaccgtgacataccgttcttcaaatggatgatagaacgttaactcgcgacagtgcaatgcttgacgcggtaataaatcatcggccacaccgtataaattatcaccaattaagggatgccccagtgatgcaaaatgaacccgaatctgatgtgtccgacctgttagtaacttcaacttaactaacgtggcatcggtgccatgggcttcttgccaatattccgttaatgagcgtttgccaccaaccccaacgacccgccgcatgtaaaaatcatccgaccgtttgattggccgatcaatccacgcatgttgcggataatctaaccgcatatcaccactggcaatcgcaacatatgttttttgcaattctttagattggagttgcttatccaacaaactatgcgcgaagccgtgcttggtgaacatcatcaaaccacttgtatcgcgatcgaggcgcgttactacgtgcactgcctggctctcagcattttggtcaatcaagtattgtttgacgaaattggccattgtgttgtgcggatggttcggtgccggtaacgacgccacaaacgccggtttatcgaccactaaaaaatggtcgtcttcaaaaaccactttcaagtcccctttaactgggatgacgtgttcgacggccacttccggtgcgaggtaaacagtcaccacatcgttttgaaccagttgggcattggtatgtgcctcctggccgttgacgaggattgtgccacctgcaaatttaattttagttaactgactgcgagaaagcttatgccgccgtaaaaaattccgcaacacacagccttctgcatcttgatattgccattcaaatttcatgttttgacccaataaatgcatcttcgacacggttccagaaatgggtgtgtcgataacgtgcaaactgtattctttcctttgcaattttaaattgcatcgaggcaattggtcgatccttaaatgtgaattgatcaattgtcacaacgtaatcacttgtcttagaaggcttcaggagcaaccattcatccgatggtaacacgattggtgccgatagtgttcgatatacgcgattattaatcgacgcaatttcggtcatctgcatcgcgtctaagcgtggatgtaaaaccgcgccaccaatcgacttactataagctgtcgacccagttggtgtggaaatacagagcccatcgcccctaaaactttcaaaaaaattctctttaatgtaaacgtctgtccgcaaagtcgctgcataccgacgtaacgtcacttcattgagcgccaaactgcgactgatttcgtgcgtatccgcatattcgattttaacttctaataacggatagctaatactctgcccgagatcttcttgcaaggcgacgactagatcatcgacttcaaaatcgcgccagtcagtgtaaaaccctaaatgtcccgtgtgcacgccaataaaccggatgtgcgctaaatcgtgggcgtaccgatgaaaggcagataaaagcgtcccatctccaccaactgaaatgaccacatcgggcgtttgatcatcaatgacaaaccccgtattgatcaatttttgcattaagcgattggcaacttgaacggaagaactaccgtcattgctaaataccgttactttcaatctggcgtctctccttcagaatcattttcagttgccttttcaagtgcgttttgccattttccatatgagaagagttgttgtgcttcttgaatttcttcacgaatttcagacatttctttatctaacataaaggatgcttcggccgctcttttaagccgcgccttcagcgtttcaggaaattccccttgatatttataatttaatgaatgttcaatggttgcccaaaagttcatcgacattgttcgaatctgaatctcggccaaaatcaatttttcaccactgattagttggactggatattcaattacaatatgatatgaccggtaaccacttggtttaacatttgaaacgtaatcccgttcttcaacaattttcatatcagtccgttggtgcaaaaggcccacaatttcatggatatcttccacaaactgacacataatccgcaaaccagcgatatcttgcatatcttgttcgagtaaatcttctgtaatgtagcggcgttgcatcttttctttgatactatcgattggtttaacgcgcccagttacaaattcgatgggtgcatgttcattattttgttggtattgcttgcgcatcccacgtaatttaatttttaattcgctaacggcctgttcataaggcattaaaaacttcttccaattttcgaccattataaacccctcattcactctgtcacatacagcactattttaacatagattagaattgaataaataataatcgtctgaaatacaaatttcattacaagtctgcttttttgtgctaggataataacattgcttttttaaaaaggagctcaaccgatgtcacaaacgattgaacgcgaatttaagacgatgctaacggcggcgcaattttcgcaactaaaagcggactatccatttgcagcgccgtttgtgcaaactaattattacttcgaactgcctaaccagggattggctaaacgtcactgggggttgcgtattcgactctttgacacctatgccgaacagacgctaaaggtgccaaccgtagaaaatgctcatagtctgattgaaatcactgatcgcctaacacttgagcaggctactcacttaattgagcaccaaaccgtattatcgtctggtcagatcgctgtctattttgcagcacaagccgtgattatcaaagaattgttcatctggggacaggcaacaacgcaccgccagaccgcgtctttagttgctggcctgttaacgcttgatgttacccaataccctgacgaaacccaggattatgaagtcgaaattgaagtcaccaacgtccaagaaggggcaacttggtttaaatcatttgtcacccgctatcaattaagtgaacaaataccacccaataaaattatgcgcgcccttatccatcaagcttaaactctgtcaagctaacttattgcataattttaaaattttgttagagtagacagtacaagcgcgtcgagcagtatatacaatatagaaattttggaggaaccaacttgttagaagtgtttttatttatcaacccaatcgggcaactttgtttacgttccgaagaggcacttttaaagattatcggcgaaaccgatgcaaatattcattttaagtttattccagtcttaaacttaaaaaacgtcgagcattacatgcagtttcagcaacaaaatagtcatgatttaaacttacgtaatcacgttttcagcaccatttatgaagcagtactcgcttataaggcagcaacgttccaggggggcaagaagagccaatcatttttaatgcaactgcaacaagcattccgtgaaccagatatggaacttaacaacgaattagtccttacaattgctaaacgcgtaggacttgataccgaaatgttacttgaagattggcacagtccacttactaaacaggcatttgattcagatcaacaattatcttgtgagatgaacattcagatgaccccttcagcagtagtcttcaactattcaaaaggtgaaagcgaatcaggcttattgattgaaaattgcgattcctatgaactcttgaaacaagcctgttgtgctgaaacaacacctgaacagactttccaagcacttcaaaaacaaaaaagcaccctctcacgggttgctttgcatgttatttcttaatcttagaaccggtggtcaaccgacccccggttcttttttaatgcttgtttcaaagctatttgcccccattgtgcaaataaggattgctttagtagtggttgttggagtaagggcgttaccgctaaaaaaagatcaattggttgggcactcaaccaccacgttacccgactttcaaactgactgagctgataaatgggtggtacattacgtgtgcagtaacaccagtccggaacggcttgcaagcgttcatggtgggcataacaatccgcctgtaacgcaacataatgtgcgtcttgcagccctaatcgacggtcaataatttgttgctgcataggctgtgacttgcccttataatgattggctggcagtcttgtttgtgctacaagcaagcgcacaaacgccttagttgtcaatcgcagggtttgccaagcataaccagcaaaatcacgggcgacaatatggtgatataacacccattgcccccactttggcaaataacttaccacataaaagccccactgccgccgatagttgataaaccccaactgttgctggcttaaataatggttagtaaaacaataccgttcaccaaccacccataatacaggtaatcggcgctgctgatagccgattgttcgttggtttaacttatctggcgtcaatgggctgcattggtattcaataattaatggttgctgattccgcgttaaccatacatcagcgcgctgtgtctcgccgacaggtacttcaaaggtagcatgccagcccaacgcatgtgctaattcagcaatcgcctgttttcccgccagatgggctggactctcaccaccaccagatacacgttctgcgatatgtgcgaaatatggtgctttatgcaccccacgatgcaactgaaccagttgttgacaatgtggacagaaataccgcgctacttgctgttgtttggctgcttgatcggcgcgaattaagcacccgttagtggtctgtgcaactttcattatttatcacccccaccgaaaatacgcaaaaaaataacgggttctcctaaatttaggaaaacccgttatttttaatgtttgaagtagtagcgtgttaactcaagcgcactattatccatgactttttcaccgaattcacttaaaaaagctgctgtgtattctgacttctgcccgtattcattagcgaccgctaaatcatcccgtgcaaacgcttcggtcgtattctccataaaaataataatctgtgcatagtactgatgtttgtaaagaaataggttcgacacaccactttcgatgtgtagctgttgtgccaaagcaatccaatcgtcaaatgacttaaacgataacacaatctgtttcattggattgtccgcttgattcatataagcggtcatttcatcctcttcctcagtcgcatcatcttggaccgtatctcgtttcaacagttgttctttaatgtattcagtaataccgtctttgccttgcaccatttctgattgacctttaccaccgtcaaagtttggcatattcttactaatcagtaattctaacccttgatcgttaggcaacacttggaacgttactgcatcgttgttcgcaaatgtgtgttcactgtccacttcttccagaattgaatagaagaaccgctcaatctttttatgattgctcaacaaatcaagtccagtaatcccgcgttcttctaaatcatcattttctaatagaacccgaattgtgttctcgtcgattttttccattctcatgggacaacgcccctttctaacgcgcttcttatagcgtcgtaattcactttctttgacctaccataccagtatctggcgtaacattcaagtatctacatcgcagcaattaattttttaacccatcaaaaaagtcgaggctgttaacagccccgactctcctctagaatcctgctagtaattgtgcttgttgtaattccaatgcccgtacttcacgtggtaagaaacgacgaatttcatcttcgttataaccaacctgaagtcgtttttcatccaaaataattggacgacgtaatagccctgggttcttttgaactaaatctaataattcgttgattgataagtcatcaattttaatgtttaattcttggaaaaccttagaacgcgttgagataatttcttccgtgccatcttcggtcatgcgtaagattgttttaatttcatttttattgagaggctccgaaaagatattgcgttcttggtatggaatattgtgttcctctaaccacgcccgggctttacgacaagatgtacaacttggtgatgtatataacgtaaccatatgtctctctcctttattaacatgacaccttacttaacaataagacaatcattttctctcttacaaattttattatacgcgagtcagcactagaaaactaccctaaaattaaatttattaattattttttaataattaataaatagacatttggacataaaacgtctaattaaaacggtttattattaaattttcccactcaccattaatttttatgtttttacatttatatttatcattcaaaaaaaattatagtagtttctactttctaatgaaaattcacttattttttgtaagtttcatcaacgccgcctatattacacgctccgacatcaattgtcaaatcctgttgggcaactatcacgggtacgtccccaacagtcgcttgtgcttgtgcctgtagcgtttctgccgaaaccccttgtggtaaatgcgttaatagaattttagctgcgccactttcttgtgccaagttaccggattgcgttgttgtcatatgcgccattttaccagtgcgatcttcaagaaaattcgtatcagtcatcagtaaatctgcagactgacaaaaagcagctaattctgggaaatacgccgtatctgcagtaaagaccaagacctgccccgtcgtttgttcttcaattcgaacagcgaatgctgggacaggatgcactgtccgtttgaaagttactttcaacggccccagggtcagctctgtgtcttcttgataaccaaagccctgcgtcacacccggttgtgtcaaactgccaaagtggagtggatcttgcagatgcccgtaaataggtaaaatgggttcctttttggttccttgatgcagttgccaataatattgtaaaacccccacatcagcaatgtgatcgtgatgatagtgcgtgagaaggaccacatctagttgcaatgggtcaaattgtttctcaagcgctaataaagcgccactcccacaatctagcaataaatgatacgccccacttgttaataaataactactagtcccaacaccggcgtatggatatccaccgtaataacctaagactgttaattgcatttttaaatgaccacctttctaatttctatagtagcgcattccgggtatcgcgcgcactatatttactaactaaataaaaaaagaccgccacccaaatggatggcggccctaatgctattgaatgacttggactttcttagctttaacttcttgatagaaaatcgtaacgctcataattaagtatggatagaaccacaagagacctagtccagcagtcatatagacgaccagttcccatccaataaatgataaagtaagcccgagtaatttcagccagttcccttttaaaatcacccatgaaaggctaaagattaatttgagtggtgcttgtggtaaatcaaacttcaacagtactaaaatctgataatacgttaaaatcacgggttgcaacagtgacaaaaccaacatcaccgtcacaaacaataagacagtttcagaaattgtcccctgctggctaatgtttagcaaataaggcgcaacggaatctaatccattaaaagtgaattgaaatacacgatcccaaccgagtaaccgataaaacggcgccaacccaattaatagtaagatccagtttaacacttgttgaacaagattcaataccacaagatgggtatacaacggttgccggaataacaataaggtatcccggtaatagctgggcttattctggctaactttataaacacctaagaaaacagcatttaaaaagataaagtataagaaataattggcaaaggtgttgagcatttgataaccaaatgaactggcgccaaacacgccttcaatcattgagtcgactactatctcaactaacaaccaaagcgcgactaaagcggccattttctgccagtttccttttaataattgacgcgcttttgcgcggtacatagctaattgcaaaaactttccctccgagtttagtagaacacatcactattgagcggtgcattcacaattcgattgtagatattggccgtaattagatagaaaacaaagtaaatgatgataaacaggccgcaaacgatataggctaattgtaacccaggattatctaaaaacaaacccaataaccgaattgcaaagaaggcgtgcatcgatcccaaaataattggcagtaaaaagagcatcaaaatttggaaataaatcgtgcgcttaatctcaccgtcactcatcccaatttttttcaatgttttatactgcaaaatctcttcttgtgcttctgacaattgtttcaacatgatgatactaccagtggctaacatgaagattaacccaataaaaatggcgacatacatataaaatccgaagtttgcgttagcaatatctcggttaggtttttttaaaagcacagaatagcggcttaactcttctagccgttgatcagtggttttaatttcataatgggtttgcccggcttttttgtgcgtcattaaataatcccattgtttgggcttttgagatagacggaataaatcgcgcattaatcgtttttgcttttgttgggcagcggagagctgaactgcatagatttgatcaactgaagttgcttggacttgttgatattcagcatcattggccacaatcacgtttaagttaccatcaaagaagacatcagaaccgtttggaaatagcttacgaatgtgtacaatccgaaaatctgaaagcccagactgttttaattgcaacgggattccagctcttttcggtggcaaacctgcacctgctctgcgaggcatcttcagcattgttaatggcaagttaatgatggtcaccacagtatttttcttcaatttagttgctggtaacttaaattgttgcgccattacttggttgtattgggataacggcatgacaacagctgctccatccattttgatgccttcccgatttaacggtgaattgaccttaaatcgagcatccaccaatttaaacgaagacattgtttgactaaccggctgaacatgatattgcgttaaaattttgtcgaccgctgctttttgactttgtgtataaaccaaatccaccggaatgttctgccgtaatgtatcttgaccgtgcgtataaatcatcgccgcacttccgattgcggtaatagtgactgcacttaaaatcgtaatcatccacaacatctttgcattctttttaaaacgaaaactcaaattcgtaacgtttaacaaatgtgtcccacgataataaagccgtttccagtgccgttctaactgtagccaaatttgcgtataggcctgaaaaaaagccagtgtgccaaaaatttcaagtaataaaatggttagtaaataaaccaaatcaatcccaaaaccatagcgccgctctaagctcggcatcaaaaccagtgtttggtctgccaaataatagccgctgataatcaatacaggtgcaataatcccccataaataagtcagccagttcggtcggcgcactttccgactgactgcagatggttgcagcaatgtcactaattgataccgataaatcatcgtactgtttaaaaaaccagttaataggaacaacccgccaaaggtgaatgtcgtttgttcaatggcccgccatgatattaaaaacggcatggcaaccgcaatccccatcatgcgtaataataacatcgcgaataatttcgaaaaaagaatcccgaataacaacccgataatcagggcaatcacaccgataatcaaactttcaaagaagaagagtaagctaatctgaaatttagtcaccccgatgacacttaaaacaccaatctcccgccgacgccttttaatgaaaaataaattagcatatgccaagaaaaaagcggcaaacagcaaaataattaaacctgctacttggatcatccggccaaaagctaaagattcaccagccatcttgaggtgcctaaagattggcgcagtttgaatcgacgtaaagcagaaataaaccacaatcgcggcaacacaggcaatcacataagccgcatagtcgcgcgcatgattaatcgcatttctaacggttaggtgtaacagcattgaaacggcctcctccacctatggttgcttgcatatcaataatttgattgaagaattgttgccgatcaccattgcgaacgatttccgagaataattgaccatctttaatgaaaagaattcgccgacagtaactagctgtaaaggcatcatgcgtgaccaataaaattgtcgtcttttcctgacgattaatcacggttaaatattgtaaaagctccgtagctgattttgaatctaaacttccagttggttcgtcggccaataacaaagtgggattggtaatcattgcgcgcccacatgccactcgttggcgctgtccaattgaaacttcatccggataacgatccaacaaactactaatgcccaagactcggctaactttatccaaccgtttttcaatcactggcacacttaacttatcaagcgctaatggcagtaacatgttttcgcgaaccgtcagtgaatctagtaagttaaaatcttgaaaaataaagcccaaatcttgccgcctaaaattagcaagcttagcttcccgcatccgactcacaacttgatctttaattaacacttgaccatgcgtcggccgatcaatggtcgcaatcatatttaataaggtcgttttcccagcgcctgaagggcccataataccgacaaactcccacggttcaatatcaaatgaaatattattaagcgcattgaccagactaaaccgatgcccgtagactttcgaaacttgttggactgatacgactgccattttttcacatcccttaactaattggtattcattttagcagagttgaccgcaaaagcccattttataactacgaccttagttggttgtcttttctagtgaaagtggttaatattagtctatctatgtatgaggagaattcattatgtttgaaattatgattgttgaagacgatccaacgattgccaacttaatcgctgagaacttaaataagtggcaattacacgcaaatattacgaccgatttcgataccattttcgaccaatttttaaccaataaaccccatctgattttactcgatatcaacctgcccgtttatgacgggttctactggtgtcgcaaaattcgtgaagtatctaaagtccccataattttcatttctagtcgcagtaccaacatggacatggtgatgtcgatgaacatgggcggcgatgacttcgtcaataaacctttttcgatggaagttttaattgccaaaattaacgccctcttacgacggacttacaactacgtcgaccaaaatgccgatatcatcgaacataacggcctaatgattaacctccaaagcggcggagctcaggtgggtgagactaccattgatctttccaaaaacgaatataagctcctccaatttctgatgcgtcaacacggccagattgtcagtcgcgaaaagttattgcgtgccctctgggacgatgaacggtttgtcgacgacaacacactaaccgttaacatcaatcggcttcgcaaaaaaattgaaagtgctggtttagaagactacattcagacgaaaattggccaaggctatatcatcccctaaggagttattatgacgtttaaaaaattcttacgtgatcatttatttcatatcgcttttttcttcagcggtatgattgttctggatatcgtcctatggctcgaccctagtatgcgctttgctaaggcgacacttttatacctcgatttattgctggcgctttttttctgcgcctttttggttggcttatacgtctaccatctcaagtggtaccgcacaatccaaacacgcttagatgctaaagaagatagcctcaactggccacttacaggcgctacctcggctgaaaaacaattcattcaacactacgtgaatcaactgctagcctatcatcaacaaagcattgaccgactaatctcagcgcaacaagatcaaaagaatttcattgatggctgggtgcacgaaagtaaggtccccctagcagctactcaattgctcattgaatccatcgaagaccagattccagaagacaaattcaatcaattaaccgatgaactgatccaaattgaacactacgttgaacaagtgctctactactcgcgtctcgatagtttttctaaggattacttggtgcaggaatacgatttgaaacctttagtcaaccaaatcatccgccaaaatcgcaattattttattcaaaaacacatccaatttaaactgcttggtgccgatcaaaccgtcttaaccgatgctaaatggctggcttttattttgaatcaaatcatttccaatgcgttaaaatataccccagatggcgcacaaattacggttcagattgaacgtgacgaacaaggcgtttggttaagtgtcatcgatacagggattgggattccggctgaagacctaccccggatttttgataaagggttcaccggtcaaaatgggcgctattctaaccaacgttcaaccggtttagggctctaccttgcacgtgccttaagtgaaaagctcggtcacgaactcaccgttagctcccaacaaggcagtggttccacttttaaactactctttccttttttaagttactacaacacggatgacgatgacggcttattcggcaaaacccatcctgcagacaaatgaaacggagcttcaaaatgcgtaaaacacttttaatcactacccttttaacaataacactcctagcaggttgccaagctaaaaaaccggcttcatcaaccacatcccgcgcgcagccaactatgacgacctacgccaaccggacaacaactaaaaaagccctcgcggccgattcacagacttggttgtttaacaaacaactcctttctaagcaaactaaaaacggtctttctgatgacatcactgtttcaaatattgctcaaatgaccactcctaaaagttggctgacctctaaaggcaccttcacaagtcagccgattaattatcaacaaatttcgtttaaaaaatggcaacaagatagccgcagtcatctgatgaagagctatcaaaagacactccatctgatgactgtggcacaagtcaacgctgcattacacaaattgggggctgactttaagattaaacacctctcagatctcgtctttcttgagactaagactgggaaaaatacaattgaccagggattcgttgccaaaggaaatcgcctatacgcaattacagctcattacagagatctacaaacccccaccaattttgaccgcggacagttattcgtcagtcaaaaagcaaccgccaaaacaacagccagtcctgttgccctcgaccaactcaatggcacttggattgcggccgcaacaacgacgagtgctaatgacaccggaaaactgatggtcaaagatggcttcatgtaccaaaaacgttataatagtattgaacgctctgccattcaagatcttgccaaatacactttagtaacgctcaatcaaaatacaatctatgctgctcaaaaaagggatgcagcacaagctggttatcaattaacccctaagtcgattgctagtggtgatagtatcggttatctctacctcttcatgaatgatcatgaactgctacgcatcggtgctggtcaagcaacaagctatcaaaagacggactcactagtagctgctgccgatttatcacagactgatcaaaccatttttgagcaacttgatcaacaaaagcctggtgaatcagcttcaaccattacggtcaaagcaggtcccgctgttgtcgggatgagtgatagtatcaactatctaaccgatgcaaccgctggccagatttcgaacaatatcgtcattggtaacgttcaaaacgggcacgtcaccattgcaagtgagtcaactcattaattataggcacaaaaaaaaggtccgacattcatgtcggacctttttttgtgcttaagccgcttgatcgcgggctgcttcttcttttaaagccatgtctgtggcgatcttgatgaatggtaggtaaatgagcactgaaacaagtaagttcactgctgctaataccccaccttgccaactaaccgttgcgatgaccccaccgataattggtggtgttacccaaggtggcataaccgttgcagcgggcactaacccggtgctagttgcaaagtatgcaattgtaacgatcaccattggtgtggcaatatatgggatgaataaaattgggttcaatacgattgcaagccaaatgttaatggttcgttaatattgaagaccccaggagcggcactcaaattcccaacgattgaatattgtttattctttcgacccactaaccagattgcaatgattaagcctaaagtagcaccagtcccacctaagttaacaaatgaatcaaagaatggtttgttaacaatatatggtgctgctttaccagctttaatcgcatttaagttagctgtaattgcaggtggtaccccatcaggcatcttaatgactaagtgtttattacccaataaacgtctgagaatttctgttgaaatcatcgcaacgattaaagcaacgaacaagcccattgagtccatccctgcaagaccgccaacagcaaagaatgaccctaatgctgttacgccggctgctagtggattgatattatatgacttacctaaattgtaagcaactaggaagacgataaacacagaaagaatcgcaaatgtcccgctccaagcattgcccccgaatttagtccagatataagccttttcagcgcccttaccaactgtctttgagaacacactgttcatgaaattggtatatgccggaattggtaaattgttaatcaaggttgcaaaagcacccaagatcatcaatggcatcgttgttacgaaggcgtcacgaatggcaaatgtcgttgattcccaacttttgccgcaactggtaaaaagcgtttctccatgaaactgataaatgaatccattaacctcactccttttcctgaatcataattaaaaaataattgctattacaagtattatgttacagaaagcgttgtcaaacgataaccccgttcattacctatgaatgtccagtttttcacaaaaactaaaaaaagcgccaacccattctaatcatggattgacgctcttttttatccgtgttaggtatataccaatgacggaaaataaaaattaaatttttaataactttattttacatattactttcaatgaacaagctttgcccatataacgggctttttagcggctaatgattttttgacatcgataatccgttgattggcactccctctgaactgcaatgtcagatccatttggtccttcatgaagcgcccatcaactaagatatcaatcttagacagcaactcgagtttatcatctgattcttgcatcagttcttcccacgtatatcccgtccatgaccagacgtcctttgtctgcccataagtggcgcgaattcggtctactagcgataaacaagtcttggtattcaagaacggttcgccacctaataacgtcagtccttggacataagattgccctaaatcagcaataatttggtcttctaattcagttgtataagggcggccatagcgaaaattctgcgccactcgattgtaacaaccggggcaagcaaacatgcaaccactcacatataggctacagcgcaccccttcgccatcaacaaagttaaacggtttataatctgcaatataatcctggcttagtgtttcagaaagccattctttgggcgccggattcttcgggccttgttgttttactgccatcttcaaaaactccttcaaatcccgtattcacaattactgccgtgcaacgttgttattatcgttgccaatggtaatatgcatgtgcttaactcgactggcgatttccttatgccgaccatgcaccattggacgttgttgtggattacctagataaccacaagtccgcttaacgacgtcacatgtagcagcatccgtgttcccacattgtgggcattggaacccgcgttctgtcggcttaaagtcccctttaaacccacatttgaagcattgatcaattggcgtattcgtgcctaagtagccgacacgatcgtaagcataatcccagacagcttctaaagcctttggattttgacgcagatttgggtattcacagtaatgaatgaacccaccagaacagtattttggataatctttttcaaaatctaatttttcaaatggggttggtgccttacgcacatcgtagtggaaactatttgtgtagtattctttgtctgtaatattttcgacaatgccaaatttttgcgtatctttttgacagaacgtatttgttaaactttctgctggtgtgctgtaaacagagaagtgatagccgtattccttttcccaatcaacgcagtgattatagaggtctttaacgacgtctaccgtaaaggcttttgccttggcatccttttcccagtctggcccaaagaaggctgtaccgacttcataaaggccaatatagcccaatgaaacagttgcgcgtgaatttttaaagacttcatcaacactatcggttttcttcaaacgcttgccaaaggcaccatattcataaagaatcggcgcattttctggcttcgcttctttagcgcgttccactttaaagaccagggcttccttgcagacttgcaaccgttgttctagaatttcccagaacttagcttggttgccatcagcttcaagtgcaatccgtggtaaattgattgtcaccacgccgagattcatccggccactattcacttcttcaccatgttcgtttttccagccttgtaagaagcttcgacaacccattggtgctttgaaagaacccgttaattccaccaacttgtcatacattaaaacatcgggatacatccgttttgtggcacattcaacagctaattgtttgatgtcataatttggatcagttggatttaagtttaagccgcgttttactgcaaaaactaatttagggaagatggcagtccgtttttctttacctaatccttcaattcgaattgaaagaattgctttttgaatcgcacgttcaatccagttactgcctaatccaaaaccaagcgttgtaaatggtgtttggccttgggatgaatataaagtattgatttcatattccaacgcttgcatggcgtcataaatatctttttcagtcttggtttgcgcataatccttttgttttgcttcgccatcaatccaattcttggcatctgctaaatgtttggcataattcttttcggcaaatggtgccaataattcatccacccgatcagcggaacaaccaccatattgactagaagcaacgttagcaataatttgtgacatttgtgccgtagcagtttgaatcgaatgtggcgcttcaacttcggcattcccaatcttaaagccatgattcaacatttctttaaaatcgattaaacaacaattggtcattggactatatggttggtaatccaaatcgtgccaatgaatctcgccttttaaatgggcgttcgccactttatcaggcaacatcttaagccccatcgctttagcaactgtccctgccgttaggtcccgctgtgtattaaaaacatgactatctttattcgcattttcattgaccacagtttggtcttttttcaataatttttgaatggtaaagttgatatcagttgccttattccgggcaaagtcccgttgcgtccggtagttaatgtattcttgggcaatatcatattggtgatgttctaaaagtttatgttccacaatattttgcagttcatagattttaacatctttatcaaatcggctgccgacttcactcacaacatctagtgcgactgtgtttaacacttgatagtctaatggctctaattccgtcttcacatttttagcggctttaataattgcttgttcgattttatccgcagaaaaaggcatgattcgcccatctcttttaatcactttaatttgcaagtctgcttctgaagcaattttcatatccatcttagcaccagtctccttttgaatcagtaaccccatcatagcggattaaaaattcggattcaacctatatatagtagataaaccaacaaaaagacgcactacaactatatgttgtgtgcgtctaattgtgtgcgatattttctttcgcccgtccttatcgaaatctacttcatactgcttaaaaaaagattgacatcatgcatctcgttttaatttcaaagtcattgcattaatagccacaacaattgttgagagtgacattaagattgcaccaactgctggacttaatactaacccaattccggcaaatagccccccagctaatggaatcgctaaaatattataaccagcgccccaccagagattttgcgtcattttgcggttagttgcgtgcgataaattcaagaaatgcataatatcgtttggattactcttcacgaggatcacatctgctgaatcgattgcaacatccgtcccagcaccaattgcgattccgatatcagcccgcgttaaacctggtgcatcattaacaccatccccaaccatcaggacgacttcgcctttagcttggtaatctttgacgattgcttctttatcttctggtttcaagttcgcttgaaccgtcataccgcccaattgtgcagccactttttcggcaacttgttgattatcaccggttaacatgaccggttggatatgccgtttctttaatgcttggatgaaagctggcgcttctggtttaatctgatcaccttgtgcgactagtcctaaaaccgtttgatcttgtaatagataactgatggaattccctttttctgctaaagtttggaaaagagcttgatcaaatttaatatgctgggcttgtaaataagttgccgtcactatttgataactttgccctgcaaccgttccagacaaaccgacgccttgaatcgtttgaacattgtctgcctgtaaatcaggaatagtttgtgcttggttatactctagaatcccagtggccaatggatgacttgaatggcgttctaacgcaccaaagagttgcatgagtcgttgttcatcaagtgctgtatcgaaaacttcgacagcattcactttgaatgcgccttgtgtcaaagtccccgtcttatccatcaaaacaacggtaaccttatctgacaattcgattgcttcacggttacgaatgagcaagccgtttgtagccgcaatcgctgtacttctggcaaccaccaatggaatggccaatccaagtgcatgcggacaagcaataataaagacggttaccatccgttcaaaagccgtattcagatcggccaagaacacccaactaatgaaggcgataatcccagcaaccaatgcagcatagaaaagatacttcgcaactttatctgctaacccttcaacttttgatttttcttgttgtgcttgtttaattaatttcatgacttgcgctaagtaaccactttcgccagtcccggtcacttgcacggttaacgtcccatttccgttgactgtcccaccgattacttgatcgccttcagccttcgcaacagcctttgattcacctgtcactaaggattcattgacttggctttgaccggcgataattaacccatccgcgggtactttttcaccagctgcgactaatacagtttgtccttttttcaagtcctttaaatcaaccgcgtgttgatgccctgcttgatcaattacttgtgcttggccgggtaacaaagcagccattttttctaaagcactccctgcactcattaccgcattcatttcaatccagtgtcccaacaacataataacgattaacgttgcaagctcccagaaaaagtccatcacgtggccttgtgggttcaagaaatggttcgcaacaaaggcgtataaactatatagataagaaacactgatccccattgcaattaaggtcatcatcgctgggctcttagcagataattctccttgagcgccctttaaaaacggtgccccaccgtaaaagaagagaaatgttgctaaaatcaatactagccaatctgaacctgggaaagtcgtttgaaaaggtaactgcatgcccataaatggtgagagaattagaattggtaccgttgcaattaatgaaatccagaatttttgttttagatttcccatgtgcatcatatgaccaccatgcatcatcatatcgccgtcgcccatgtcatggtgcatcccatgcatatcgtgattcatatgccccatatcatgatccatcatctcatggtcatgatgcatgtcgtgcatgctgtgatccatttggtgctcgtgatgcatctctttcatatcgtgtccttcatgttcatggtgcatttcatcgtgtttcattttacttcctcctctatgcaatcacaattggctggtaaacaatcacattcaatcattgttggtgcactaggtaatttagccgctaacaccgtttgtaacgtctgaatatcattttgactgagcgttgtttgctcaattaaagtggctaatgtgcagccttttttcatcccacataattggttaaacagcgactgcgtggcatggttcatcgcttcatcttctgcgatattggccgtatatataaatcggcgtccttctttagtggcaattagatagtctttttttaccaaccgacctagcaaagtcttaacagtcgacgcttgccaatcgcgcttttgctgaacgagttcaattaaatgactgctgttgacttgcccaagtgaccaaaccatccgcataatttcccattccgcatccgtaataacccctattttttcagtcattcgcggttttctcccttcgtttacatttgtaatcattagttacagtttacatttgtaatcgataactgtcaatcttttttgctcatccaaattttacgcacaaaaaaagaccgccacagtgggcgatcttttaccatttaattaaagattttgcataaaatcttcaactaatttttggttttcttcattacttatattcacattaacagcggtttcaactaaatcagttaattgagttgtatctaaacgtttcatcaagctccgaacccgaaggaccgaagttgcgctcattgaaaattcatctaagcccattccaacaaggagtggtgccatgactgaatcgccagcggcttccccacacattccagtccacttaccttctttatgagaagcgtcaataacgttcttaattaaacgtaagattgctggattgtatggttgataaaggtatgatacacgttcattcatccgatcagcagccattgtgtattgaatcaagtcgtttgttccgatactaaagaagtcaacttccttagcgaattgatttgccaagacggcgctggctggaatttcaaccatcatcccaacttgtaaatcatcagaaacagtttgaccatcagcaattaatttagctttttcttcttcaagaatgccttttgcttgacggaattctgcgacagttgcgatcattgggaacatgatacgtaacttaccgtagtttgaagcacggagtaaagcacgcaattgtgttctgaaaatatcatcacgatctaaactaatccgcacagcacggtagcctaagaatggattcatttcttcgggtaatggcaagtaaggtaatttcttatccccaccaatgtccattgtccgcacaacaactggtttaccagccataccttccaaaacagtcttataagcttcgaactgatcatcttcactaggtaattcagatgagtccatgtataagaattctgtccggtataagccgattgcttcagcaccgttatcgataacaccatctaaatctttaggtgtcccgatatttgcagcaactgtgaatgtttttccgtcttttgtaacggatttttcattctttaacttttcccattctgctttttgatcagcgaaagcttgcgccttcttatcgtattcagcaatgtctgcatctgtaggattgataataacatccccgttaatcccgtcgacaattaattgttcgccggctttaacagaagttgtgatattttcagtcccaacaattgcaggaatttctaaagaacgagccataatagcagagtgagaagtccgaccaccaatatcagtcacaaaagccttaacgaatttaccgtttaattgggctgtgtcacttggtgtcaagtcatgagcaatcacaattacttcttcatcaattaacgctgggttagggagtgttacccctaataaatgactgagaactcgcttagtaacatccttgatgtcagcagcgcgttcttgcatgtatgcgttatcagtcatagcctcaaaagtggccacgaataaatccgcgatctctttgagcgcttgctcagcattaaccttgtcatcattgattttaccttcgatagcgccggtaaattctgggtctgctaaaatcatcatgtgggcatcaaaaacttgtgcttcttcttcccctaatgatccagcagcaatcttccgaatggtctctagatcactcgtggaagcttgtaaggcattatgcaaacgattaatctctttttctgaatctgaaatagttgatttcgaaaatgacaaatcgggttgcactaacatataggctttcgccgtagcgataccatcactggcagcaatccctcttagttttgtcattattcagataaaccttcctttttcattgtttcttcaattgcgttgattgcgtctgcttcgtcagcaccttcagctgagatagtaacgtcagcaccttggccaacaccgagtgacataacacccatgattgacttcaagtttacagatttacctttgtattctaagttaacatctgagttaaatttgcttgctgtttgtactaataatgtagctggacgtgcgtggatacctgtgtctgctactacgtgaaaatcgcgtttttccatattaatcgatccccttttatctaattatagatttagtttttaacgaaatgagtggtcactagtagtggctacccttccgatatttaagattaccattttttttaaaatactacaatagtttcgctaacaaaattagtagccgtctacactataccgctttcagacttgcggtagattaccgcaccatttcgttgtgcttcgcccacaatttcttttcgatggtcatagttgacccatactttctgaaaatctaaaaattcggactgagcaacctcaatctcagtttgttcgttatttattaaggcatccatctctgctaaaaaatcacgcatctgccattctgcctcctttgcaattcttttatcgtggcttgaaaaattcgttttcattccatctgcgaaataaaacgatgacctcatactaccgcataccgcccatacctgacaagaaacttttattttcgagttgcctgacttgcaactttttttagagatgattataatttggataaaggtcaaagatagtcaagaacactttgacgattctattattaatgaaaggttgtgacagattaatgctttgtcaaaactgccagaagaatcctgcaacgattcatctctatacaagcaccaatggtcaacgacaagaaatcgatctttgtcaaaactgttaccaactcttgaaacaacaaaacagtaatggccaagcaccacaagggcaatatgcagatccatttggctttggaagcctgaatagtttcttccgagcaatgggcgcaactcccgatgatcaattacaagcaaaccaagggccacaaacccaaagtggcggccaaggtggcggcaacaacgggcaaaacggcgaaagtctgctcagtcaatacggtgtaaacctaaccaacttagctaaagctggccaaattgatccagtgatcggtcgcgatgctgaaatcgatcgtgttattgaaattctaaaccgtcgaacaaaaaacaatcccgtattaatcggtgaagctggggtcggtaaaaccgccgttgtcgaaggcttagctcaaaaaattgccgacgatgacgttcctgccaaacttaaggataaacaagtcattcgcttagatgttgtttcacttgttcaagggaccggtattcgtggtcaattcgaacaacggatgcaacaactgatgactgaattgaagcagaataagcaatacattctcttcattgatgaaattcatgaaattgtgggcgccggtaatgccgaaggtggcatggacgccggtaacgtgttaaaacccgccctcgcccgtggtgaactccaactagtaggggccacaacgaataatgaattccgacaaattgaaaaagacgcggccctcgcccgtcgtctccaacccgtttcagtcaatgaaccttctgttgacgaaacagtccaaattctaaaaggactccaagataaatacgaagcctatcaccaagtccactacacagacgaggcacttaaggcggctgcaaccctttctaatcgttatatccaggatcgtttcttaccagataaggccatcgacttacttgatgaaaccggctctaagaagaacttgacgattaccgttgtcgatccaaaagaaatcgaaaagaaattacaaaatgcggaagctgaaaagcaaagtgcgttaaaggacgaggattacgaaaaggccgcttattaccgcgatcaagtcacaaaattgaccaagatgcgcgaaacaagtgccattgaccaatctgaaatgccaaccgtcaccgacaaagatatggaaaaaatcgttgaagaaaaaacccacattccagttggtgagttaaaggcacaagaacaagcacagttgaagaaccttgctgaaaatcttgaagcgcacgtaattggtcaagattcagcagtcgataaggttgcccgttccattcgtcgcaaccgaattggtttcaacaaatccggtcgaccaatcggttctttcctattcgttggaccaaccggggtcgggaaaactgaattagcaaaacaaatcgccaaagaacttttcggtagcacagatgctatgattcgttttgatatgagcgaatatatggagaaattcagtgtgtcaaaattgattggatcacctcctggctatgttggctatgaagaagcgggtcaattaaccgaacaagttcggcgcaacccatacagcttgatcttactggatgaagttgaaaaagcacatccagacgtcatgcatatgttcctacaaatcttagacgatggtcgtctgacggattcacaaggacggacggtcagcttcaaagacaccatcatcatcatgacttcaaatgccggccaaactgatgccgaagccaatgttggtttcggggcaaccctttctggtcagacacactcgattttaaaccaactacaaaactactttaaacctgaatttttaaaccggtttgatgatatcatcgagttccaaccattaagcaaagaaaatctcttgaagattgtcagtctgatgctcgatcaaacaaatgcgatgattgctgaccaagggttaaacattgccgtaactgaaccagtcaaatcacggcttgtcgatcttggttacaatccagagatgggtgcgcgtccattacgacgtgttattcaagaacaaattgaagatcgcgtggctgactattatctcgatcacccagaacataaacaattgacggctcggttggtggaagatcagattcaaatcaccgatgctaaagattcacaggtcacagattaaaaggctttattatctcaagttaaaacgaattacgtgccaaatgaagcgttttcagttatactagtggtaagacttaaacatccagggagtgatttagatgcgcttaatcaatgtaaccaattcttataagcgacttgtttcacaacaactcgctgcaacagccgcaacctacgttaaggtttattcacttggtaaaacaacggttcttgactcgcgttcatcgaaggaacgtgagctccttttaaaaaatgatcatcgacatgtccaacaagccgagatcgattttgtattgaaggaactcgccggtttagattccacagatggccttgaagtcttgaatgatggtccattagtcgaaattacaattccaacaccttcaaaaacagtgagttaatcattcgaaccgccccgacatttcattttgttggggcggttttttacataggcaaaataatggcaattgaataggtcgtaccgtataataactttcaacctaatttaggaggattaatgacgcgatgaagacttttcaaaaagagcaccaaattatttgccggttagaagtgggcgacgaaatcctaacagaacttaaatatttggccgcaaccttccccaaccaactgggaactatcacggggattggtgcctgtgatgaagttaccgtcagcgtttattcaccagaaacggatcaatatattgccacttccagtcaagagcaagtagaactgctggcccttagtgggaatgtcgaaaatgcaaatggcacgattgatgtccatctacatgcaagctttgcccgtttagatacaagcgtttttggtgggcatctagaacgcgccgtcatttcacgtacaggagaattaatcgtttccttaattcccgtttccatcggccgcgtcacccatactgcaactaaattacaagtattagatatttaaacgattagaatcactgctatttttgcaggggttcttttttatgcccacttgacgcgttaattatcaaccacactttttgtaatttatgatagactagtagtaataagtaatgcgctacaaggagtccgtatgaatctgattaacctgcttcaatcgttattgaaatggcgcccgaaaaaagcagctcctctaccgaacagtcatgtacgccaaactgtctctgagcaagagcccatccgtcaagcgcctcaatcgtcacagaaacagccggtcgttcccgttagtcaggacgcaacgccactgctggctacgatgtccacacaaccgcgccatagcacagttaccattcactacctcgatcatcatcgggtccctttacgaccaacgatgaccctgacaggtgaagtgggtaccgtgctcaatttgccatggctaaaatttgccggttattacttggcagctattaccaatttaaaacaacagtttcctgaagaaaacaccactatctggcttttttataaaccgcaactcgcagcaccagtaatggtgttacaccagaatttagaaggtggcttgttgattaagccccaatttttatcaggtgctttgaacgaacactatcaagccaatccactagaaggtggtgctaacttcgtgcaccacacctcagctaatcagactggtcgctttacaactaagacacagtttgtccattttaaatatgatccgctgaatttaaaacacagcgatgcacctgaacagcccttcatcgaacttcttgagccaacggatacctatcagcaaccaagtgaagaagcgctgactgctgctcgcttgccaaagcacgcggtttggaagatttatagctgtgcaactgctccatctggcaaacaatggttcaatcttggcagttcttggattacccctacgcgttatcaattacatgccactaatcctaaaggcagtgatgaatcataccaagtaccaaagttcacctaccattacgcagttatcgaaacaacccctctaaacctcagtgcaagtctgaacaacaataccgtaacattttggcaagcaccgtatgaccaacccacaacatatcagatagtgcctaaaacacgggtagtcgttaagcaagtcgttgtactcgataatcaaagtcgctggtgtcaacttaaaacaggtcaatggttaatggaaggcctcctaacttttgactaaatacccccctaaaaaaaataagccgccgattcagacaacagttagtgtgtctgaatcggcggcttatttttgtttgactctttatattatagttttgcggttaattcaacgtctggatacttatcttggaaccaacgttctgcaaattgattttcaaataagaacaatggttcgtcatgaatatcttttaccaatagatttcgtgaggatgacatccgttcatccaattgttctggattgatccaccgcgcagttcttgaaccgattggatccatcaatacttcagaattatattcgtgttgcatccgatattggaacacttcaaattgtaattgaccaacggcgcctaagatataatcgccagttgtgtaagtcttatacaactgaatcgccccttcttgaaccaactgttgaatccctttatggaaggacttttgtttcatcacgttcttggcagtgacgcgcatgaataattcaggggtaaattgagggagtttctcaaatgaaacagcctctttacccgtgtgaatcgtatccccaatttggaaattcccggtatcatataatccaacaatatcgccagcaacagcgcttgtcacttgttcccgtgtgtcggccatgaattcagttgaattgttcaaccgcatcttcttgcctgttcgcgtcaatgtgacatcaattccgcgttggaattcacccgaacaaattcgtacgaacgcaatccggtcacgatgagctggattcatattggcttgaatcttgaagatgaaccctgagaaatcaggagaggttggttcaaccaacgtttcttcttgtgttttgtgtgcttctggggcaggcgctaagttaacgaatgattctaagaacgtcttaaccccaaagttagtcaaagcagagccaaagaagattggtgtttgttcacccgttgcaatcttatcagcatcataggcattgcctgcttcaccgatcaattcgatatcatcaagggcttgtgtgtaaacagaatcttctttcaatggattatcaccggcaatccgacctgcttcatcaagggccaaataagggttggcttcgtcttctggtcgataaagttcgattcgacggttggcgatatcataaaggccacggaggtcttttcccatcccgattggccagttcatagcacagccttcgatgtccaatagttcttccaattcagcaatcaaatcaagtggttcacgaccatcgcgatccaacttattcatgaaggtgaaaatcggaatcccccgcattttgcagactttgaataatttcttggtctgtggttcaatccctttagcagaatcaatgaccatgaccgccgcatcaacagccatcaaagtccgatacgtatcttctgagaaatcttcatgtcccggtgtatccaaaatattaatccgcttgtcgtcataatcaaattgcatcacagaactggtaacggaaatcccacgttgcttttcaatttccatccaatcggacttggcaaattggccactctttttccctttaactgttccggcttgacgaatcacgcccccgaaaagtaagagttgttccgtaatcgttgttttaccagcatccggatgagaaataattgcaaaagtacgacgacgatcaaccgccgtttttaattcagtaggtgtcattataaaatcctttccgttattccaatataatgcgcttgggacaaagaattgcgcaaccattgcgtcaccctttgtcccattgattgtgctcatttaatttagtcgacttcttctggtgcatcggtctctggttctggtaacgttaattgtaaatcaatcaaccgtgaaccggaaaccgaccccgtcgttaatctcatgccacctggcagctcaattgtttccggatgaccactgactggaatggcaccaatttcagtaatcacgaacccggcaattgtatccacatcagtgacttgaatatctgtattgaaggcactgttaaattcattgattggcatacttcccataacggtgtaatgctgcgcatcaattttttggtacaattcttcagctttatcagattcatcatcgatttcaccaacaatttcttccaataaatcttcaatcgtggctaagccaacaacgccaccgtattcatccaacagaattgccatttgttgctgtgtgcgtttcatttcaaataataaatcatcaattgtaatcgtttcgggaacaaaaagaggttctttcattaccgcttcgatttgcatagcctgaaaacctttttggcgtgcttctttcaagagattcttgatatgcacgacccccaccacttgatccttatcatcccgataaaccggaatgcgggagaatggttgggctaagatggcatcgatgttttgatcgttgtctgcacaaatatcaatcataaatgcatcagttcgcggtaccatgacttcgcgcgccatcttcttattgagggtaataatcccctctaacatttcgtattcatcggtttccagaacaccggcactcttcccagattcaatcatgtggaccatttcttctcgggtgagcttcggttctgtttctgaaaaatcaattggtgtcaacttcattaagagcgaggtcgacattgatagcaaccacacgaatggtcgcagtaagatgccgacgatccgcacgggttgcaccgttattttagcaattgcttctgcacgatgcagtgcaacttgcttaggatataattccccaaaaactagggatacataggataagacaatcgtcacaattaatacggccgcttcctttgtccaagccgcatttcctaaaaggggtgctaatctacccgcaatggttgtggcagcactcgctgaagataagaagcccgcaaacgtaatcgcaacttgaattgttgctaaaaactgattggaatgacctaagacttgaactaatactcgcgccttcttgtcacctttattggcttgctcctccatcttcacacgacttagtgacacaagtgcaatttctgccgcagcaaaaaaagcattcactaaggtcaaaattaatatcaacagtaactgtccccacaccgaacttccagggtcaggattcatcgtcacatccactacctttcattatctaaataagtacatttagccgaatatggcctaccttgcagtatagcatagtcaaaaatggaaattcaacctgcatcttttaaaggtcggtcccttttttagctttagtccgtaacgcttgaatatcatataaataagtaatcactgtcttggtaacagcataaaacggaatcgctaaaatcatgcctaaaatcccataaatattcccagcgaccaataagataatgatgatggttagcggatgaatatctaatgaacggccaatcacgttaggataaatcaagttcccatcgatttgttgaacaacaatgacgacaacaatcaccatgattgttttgggaatcgaaattgataaactgataatcaacgcgggcgcaatcccaatataaggccctaagtatggaattacgttagaaacgccagcaataaatcctaacaaataagcgtatggcatcccgataatgagataaccgataaatgtaaagacgccaacgaataaacactctagagcttgaccaccgatataagctgaaatcgtcgcccccattttccgaagcaagtccgccacttggtcgttataacgatcaggtaacatcttttgaatattaggcactaaacggtgtccgtcttttaacatatagaacaacataattggaatcgtgaagacactaactgtaacgctcgtaatcgcaccaatcatactaccaaaactagatgtgaaactcttcataactttttcagcaatcttcgatggttttaaatctaactgattgacgtatttattgaagtcaatgtttttcaaacgcggattgctagataaatcatccgctactttttgcagtcgatgagcaaaatctggtaggttcgtcacaagctgtgtgatttgtttaatcaagttaggaatcacagtggctacaatgaaaattaaaccgccaaaaaagacgatgaagataatcgtaatcgcccagttgcgtgatattttgagtttacctaacagattgattagcgggttaaacaggtaaaataatagtcccgcgccaataattggcccaaataaagttgaaataaaggtgccaattggatcaaataagaaactaattttggtgcaaacaaagattaacacagccaaaatcaaaagctcaattgaccaaaataatagttttgattggcgtaaacgatcaaacatgcagtatccccccagtgtgcctatgtcacacaaaacgcattttatgctatcatagtgtaacgattattgttattgtaccaaattttatagtgatacacattgattattccttttgaagaggtggttttttaatgttagtgaaacaaactcgtgatttaaaaagtacggtttatcaagatagtttggcaattcggcaagccgtattcattgttgaacaacacgtgcctcctgaacttgagattgatgaattcgaagaccaagcgatttattttgtcggctacgttgctgatcaagccgttgtgacgttgcggctcatcgaagcggactcagattatcatgttcaacgtgtcgcagttagccgttcagcacggcatcatggttatggtcaagaactgatgcgtgccgctgaagtttttgctcgggaatcaggcaaagcaacgctcactttaaatgctcaattaagtgcagtaccgttctatacgcagcttaattttcaagcaaccgccaaaccacagttcctagatgccgggattatgcatcaagaaatggttaaaaaattaactgactaattgtcatttcaccactaaatgacttataatgaacacagcttaataacagaaaggacgttaccatgcctaagcaaaaatcacttcttgtccacttatttttcttcattatcccttatctactcgtcattacgattgccgcaacggcttacgacagtcttgtgattcacagtgccacttgggatcgcaccttgttcagtgctctaatcagcagcaccctaatgttatttattaaagttccaatcgaacgaccgttgacgattatggctgacttagcccctaaccaaacacttaaaatggtaacaagtttcttcctagtagaacgttcacttggtattaagattgctaacttcatttttgatggcattcttttctgccttgcaacctatctgttacgccacttcttgccactcaacatcattgctggtagtttactcggctggtgcgtcttcgcgcttttgctatccatcagcatcggtgctggcatcggctttaaaacattaacgattcaacaagatacttcagtcgaaaacgattaacccatacaaaaaagccccagtcaatcaatgactggggcttttttgcttgagactaaatagtgttctaacgacggtgcgccaattcttgataccggttataccaaatatcaatgtattccttcgaaaagggccctttgccattgttgatccaatcaaccaaaaccttaacgttggcttttaaaatccgatcagtttcggcggaataatgccattgcgcactgtgcgcttcatattcatcgacatctagaagccgtttttcgccattggggaaaaccttcacatctaaatcataatcgatatacttaagcgcctcttgatccatgacatgcggcgatgccaaattacaataataagaaacgccgccctcacgaatcattgccaccacgttaaaccaatacttcttatggaaataaataagtgccggctcccgcgtgacccactttctgccgtctgactctgtaactaaggtatgatcgttacaaccaatgactgcgttctcgctggttttcaaaaccatcgtatcgcgccaagtgcggtgtaaactcccatcgtgtttataactttgaatcgctatatagtcgccttctttgggaatactcatcgacatacccagctttccaaggttattattcataatcacctatcattatagcaaagactcgcaaatttacctaaaactttctaccattaattggttgccaaacgtgccgctaacttcttttgcacagtcggtaatgcaacgtcagctaattgtgcctcggtataccattggcctgggaaaaaggcgaggtcggcatctgctgcaagttgtgcttctaaaagggtaattgtccatttaagatgcgtaaaaacgtgcaccacaggttttaaacctgattcatgtaattgctgcaattctagcgcaaaagcctctttaaaataagcttcgatacgagctagttgttcttccggtgtcaataattcatcgtcagttacttgcaagtcttccgcagcgactagtggataagtggacaggttcgctaataaaccggtactcggtcgtttttgaaataataagcccttttgcgagcgaatcacaactgcaaacatcgcaactggtttttgttttgctttcttcgtcttgactggataatccaataaggtaccatcttgataactccggaaaaacggtgctaacgccgtctcaccaaccgttggattctttgccgtacaaacttgcgagccaaaatccatcacggcttggttaaagtcacctgggcgatctttgggaatcagcggtaaaatcgcatcgtaaaaaatgtggcggttctttgggttggcaatatcagcatcgattttcaataaccgactgaacacccgaaaagcattgccatcgattgccgggacgacttcgccaaaacaaatactggcgatagcgcccgctgtgtacggtccaatcccggctaacttttctaattcagccgcggttgttggccactgaccattgtaatcgtcgacgacttggcgcgctgctttttgtaagttacgcgcgcgcgaataataaccaagtccctcccacgttttcattaataagtcctctggagcggccgctaagtctgccaccgttggaaaagtcgccaaaaaccgttcatagtacggaatcactgtttgaacctgcgtttgctggagcatgatttcagatagccagacacgatagggctcttgattctggcgccaaggcaagtcccggcgattttcatcataccaagtcataaacgcggtttgaaacgcgtcccgttcactcggtgtcatctgatagttcttgttcgtcgatgaagtggttgattgcatcaatattaaatcctttccgatacaacgcttgttgcatcttcatccggcgttctcgtggttcgagtaatcgataacggcgccatttttttgcaccaagttcagcaagcgcgtcagcttcactatcttcatcggcttcaagggccaacgcttcaataattaaactaaggctgtcaccgccaaaccctttttgcattaaaccttgtttgactttttgctgctgttcaaagaatgaactatgacggtatttcttcgccaacttcttagcagctgctaacccaaccgcaacttgatcatccactgaataatgactaagtgcttgatcgatatgggcagcactaacgcctttttggattaatttctggcggaccactttggggcccttatccgcggtattaatcacagtacgaacgtagctatcggcgtaatcctgatcgtcgatataatgtaactcgcgtaattttgccaagctagtctggatcccttctggagtgatctcgtgttcgcgtaaatattgcgttagttccttttccgtccgcaattggtgactcagataattgagcgccaattgatacgctttggcattatcatcgtctttttgaatgtcgcgttgcagttgactatcaatctctaaatccttcgctaaacggtatttaatcaagacactctcggtcacgccgaaagcgaattgctcatcgataaaaatattatagcggcctgattttttctgtgccgttattttggtaatcttcggcatgttattctcccttgttacgtgttgctttgatgtttaaatagactttaaatccaatgaccacgacggcgagcactaaagtcccgatgatcagtggtaagctcttgtgttggaaggcataaacgccaattccgagtacaatcagcatggcgattaaaaattgatttcgttcccaaaaattcatgtggcttcgctccttactttgacttcctgtagcatagcataaatggcgcacccggacaaaagtcactgcttaattcccactattgaagcgatttttcagtgctaagtctgttatactgaatgcaatgagaaaaacgagtatcattattttatattaataggagcggattaaatgccagaacaaacaaaccaagtcgaagtcggccaacgttttccattgacgattaaacgaatcggcatcaatggtgaagggattggctattacaaacgcaaaattgtctttattccaggcgcacttcctgaagaagtggttgtcgcagaagtcaccaacgttgcccctcgtttcattgaagcaaaagtccacaaacttcgccaagcttcaccacaacgggttacccctaaggatgccacttacggccaagtcggtgggattgagcttgaacacttaagctatcctggccaacttgccttcaaaaaagacgtcgtcgtccaagcgcttgaaaaattcaaaccacaaggctacgccaaatacaatattaccgatacagtcggaatggaaaacccctggcattatcgcaacaaagcacaattccaagtccgcgaaatcgacggtcatttagcagctggcttatacgctccaagtagccatactttaattgatttgcctgaattcgcaacccaaaccgatttaacaatgaaaatcatccgaaccgtcttgaaattagtcgaatcactcggaattcccgtctttgatgaaactaagaatgccgggattttaaaaacattggtcgttcgcgaatctttttcaaccggtgaagcgcaactgaccttcattaccaactcccctaaactaccgcaaaagcacgcattgattacagccatccaagctgaattgcccgaagtggtttcaatcatgcaaaatatcaacaaagggaaaaacgtgctcgtttggggcgaccaaacgattcatctggctggtcaagaaacgattatggaaactttaaacgacgttcacttcgaattgactgcccgcgcctttttccaattgaatccagttcaaacggctaagatgtataacttagttcaagatgcacttgatctcacacctgaagatcgcctcgtcgatgcttattgtggggtgggtacaattggcttgagtcttgccaatcaagtcgcagaagtgcgcggcatggacacgattgccgattcaattgaagcggctaaacacaacgcagccatcaacgacattcaaaacgttgaatatgccgtaggggctgccgaagacctcctcccagaatggttggataatggcttcgtcccaactgccttggtggttgatccaccacgcactggcttagatcaaaaattaattgatgccattttagacagtcggccattgaaatttgtctacgtctcatgtaatccatcaacccttgcacgggatttaaaagcccttgtgcatacgtaccaagtggaaaaaatccaaccattggacatgttcccccaaacggcacgagttgaagcagttgtgacattaacactaaaacgcgatctataacgcaaaaaagcggtccatcaacaaacacatgttgatggaccgcttttttatttggactttaatcgcctaaacgcgttctataagtcatatccttccggttaaccctgaatggcaaacgattgcttgaagcaatccttcaccattctgtgttaatcctcaggatatacccgacttatgccacactctcattttttaatgctcagatcgtttcggttgtgacgcactctttttgaaacgtgctttcacaaccactttcttccgcttaacgccgaaattaacgtccatgcgcgcccctgattgcccgatgtaaaacgggatgcaaacccgttcaataaccacaatacaattgctccgcgaccatttaacccagcatcccgataacgccgtacactaagcgccaacgttggaataaacgtgagtaccccaagcaacccgataacgattatgtacagcactaatgcaccgctcatcttcagttgcacctttgcagcttgtgcaaatagcaaagcgaaaaatggcatgaaccaaacaatcattaaaatcaacatcgcccaccaataacccgtacgtgttgttcgccccgtaaaatcaaaataacctttaaaataatctcgccaagctgacttaaacgttacttgccctggtgtttcttgaatctcgcgcattgtgaatccccttccaaaactgattaacttaattgtaccgcatttcaccactaatttgatacaataaagaaaatcaacttggaggaattcttatgaaaatttatttcgcaaacgctctattctcagcagcagactttgattataacgctaaggttgttgctcaactgcgccaatcgattcctggtgtcgatatctatctcccacaagaaaacgccgcaattaatgacaagaatgcttatgccagctctgaaatgatcgcacaagccgatacagacgaactcgttgctagcgatctcgtcattgctgttttggatggtcctaccatcgatgttggcgttgctagtgaaatcggtgtggcatacggtcgccaaattccaatgatcggattatacaccgacagccgccaacaaggtgctacaaatccgcaaaaactagcagctttacaagagatcgccgaaaaccaattccattacttaaacctttacacaaccggcttaattaaacaaaacggcacgattgtgaataatttagacgcgttgattgaggcagtgcaagcccacgcctaattaaaaataaagccattcatttgttatctatagtgaatggctatttatattgtattttgagcataaaaaaaggattcaagctttgatatgcttgaatcccctaggttgaggttgatagcttggttgttgcgagctgattctgttttacattctggataatgttacacctcatacttctattcaattgtttttaatcgttggtctagcccactgctaatcgtttcactcgatctagtttggtcgtctatctttgacccgcatgtgcagttttagcgatgacgattaaattcgtgtttactacttgagcgatattctttaacagacatcagcctccgatatacttagatcttaatactacgaagagttacacttatgtttccattggaaccacgccttgcaatttctttttcgtactttaaatcttgatgtgtcgtacattcaaatctggtgcttgtgttttaaagtggtaaatctatttaaagctaacttggtttcacttaccaagctatctttcctcaccattaatatagcaccttctgtgaccggatacaatcaaaatgctcttaaatttaaaaaagtttttccatcatttctgacttgttatttttatcagaaatagctaaaaaaactgccattaacaatactgttaatggcagtttttaggatacatagctgtttttttattaatctctaacttgataattgcgttcgtgttccttaacaccttttaaaatgattggcgcgttgtccattgccaaatcaatttcatatttgctaccgtcttctggtagttctgcttggaattgattttcgtattcagccatcgtcaattgacgtcgtgcagcaagcattgctttgtggtccgcaccggctaattgtttttcaaatccgggttgcaaaataccggtgaagaattcactgattgcacctgaaccgtaactgaataaaccaattcgatcgccggctgccaattgcgttgattgttccaacaatgaaaggaagcctaggtataacgcgccagtatagatattaccaatttgacggctatacaatgtactttcttgataacggtctaataaatgtgcttgttctgcttccgttgcttctggcaggattgtccgcaatgccttcaaacccatctttgtgtatggtaaatggaacgttaaggctttgaaatctgagattgtgcggccagtttgagcgcgatagtctgcccaagttgcttggaaaaattcgatgtattgttcagttgaatatttgccacgcgcaaaagcttcttttgaatagttggggcgccagaaatcttgaatgtcatcactgtggatggccgttgccggttctaacgccaacaaatgtggtgctgcactaacgatcattgcaaccgcgccagcaccttgtgtcacttcacctggtgtatccagcccataacgggcgatatcggaaccgatgactaatgctctttgctctggatgcgccgctacaaagtcataagcggtcatcaaaccagcggttgccccgtaacaagcttctttaatttcaaaagcacgagcattttttaatcctaataagcgttgcacataaagggcaccggcttttgactgatcgattcctgattcagtgcctaaaattaataaaccaattgaatcacgattatcatcatccaacacttcaagagccgcgttagccgccattgtgacactgtcttgactgaggggggcaattgccatttgatcttgaccaattccaattgtgtatttgtcaggatcaacgcctcgcgcgttagctagcatcactaaatctaagtaggtattaggcgtaaaaaggcccatcttatcaattccgatttgcataataatcttccaatctatttgttttcagcacgcagttgcgctaacagctcggtggctgttgctgtatttaaatgtgtcgctttcaataataatggtaataattgcgttaattcagtctcggttgcgccagcggcaatcgccaacgacttcgcttgaagcgccatgtgtcctttttgaatcccgtctgacacaagtgctttgagcgcggcaaaattttgtgctaagccaacagctgcgataatgccggctaattcacgcgcattctgaacttttaacaagcgctgattaatctgcacggttggtagaataccaatcgatccgccaaccatcccaactggcagtggcagttcgattcgaccgcgtagttgctgatcagttgtccattcccaactcgaaagcggttggtaagcaccctttctagcagcataactatgcacgccggcttcaattgcgcgccaatcgttgcccgtcgctaacaccactgcatcgatgccgttcataatccctttattgtgggttgctgcgcgcgccacatccactttggcaaagtcactcgccgcaatcatcttttcggcaattgtttcgccagcaagcgtcgcagttgttaaggtagctggatcaatcgtcacacttgcggtcaccacggattcaaacgcggcattggtcaaaacactcaataaaagggtgccgcccaactgttcttgcacagcatgtgcgatggcttcacagattgtgttcacaatgttggcacccatcgcttctttggtatcaatttgcaattcaagtttcaaaaagcggtcgtcaataatcgtcggcgtgattttttgaagaccaccaccgcgtttaacaattgatggatgcgcagcccgcgcaacttcaaataaatggtcattgttgccactaatccaagctttagccgctactaagtcaactagcttctctaacacgacttcaccagtcatcagccgcgtcagttgttcagtcacaaagccgccattagctcgtgccatcttagccgcattattagccgccgcaataacggatggttcttcgatcgcaaacgggacttgatagacttgctgattgactaataaatcttgcaccacaccaagcggtacttggtactggccaatttggttttcaatcatattaccagcgatctcatctgacaagggttctgcagctgctaaacaatcagcatccgtctgacttaggtgaccttgttcaacaagcgttgctaaacgttcatccttcgttaattgatagaacttaggctttttcattacaccatgcctcatttaattgaatttcaaaagcaattcctaacccgccaccaatacataacgaagcaatccctgttgtttggtgcgtccgtttcaattggtgcattaacgttgtcatgatgcgcgtacctgaagcaccgattggatggcccaacgcaatagcgccaccggccacattaactttagcaggatcgacttgtaacccattttgaacggccacacttgaagcggcaaacgcttcgttaatttctaataaatcgatatcggctaatgtttgattttgttgcgctaataatttttgaattgcatcgaccggcgtgtaccccatgtaatctggatcagcaccgacttcttgatagccgaccaaagtggcttggtaaactaatccgagtgcagcagctttttccttgctcataacgatcatggcagaggcgccatcgttaatgccggaagcattggcaggtgttacagtcccatcttgttgaaaagctgggcgcaacttcgccattgcttcgatggttgtcgttgggcggataccttcatcttgttgtacttcaagcgttgctttgcgttgttgcaccgttacaggcacaatttcttcattaaaccaaccagcttgggtcgcttgcgcggctttttgatgagaagcgagtgcaaaagcgtcttgcatttcacgcgtaatgccgtatttagctgctacattttcgcctgtaatccccattggctggtgcgtaaacgcatcgtttaacccttcgctactgatgctatcaatcattgtttggtccccaaatttactcccaaaacgcatttgtttattcaaataaggcgcttgtgacatactttctgtaccgccaactaagacgatgtcagcatcgcccatgacgattgcactctgcgccaaccgaatcgcttttaagccggaaccacaaacttcattaactgtcattgctgtgcttgattgtgtcatcccactcttcaaagcgatttgccgtgcaacgttttgcccagaaccggcttgtaagacattcccgaaaattgcttgatcaatctgagttggatcaatcccggctgcttcaatcgccgctttagcagcaactgtccccaattcaaccgcgcttaaacttgcaagttggccccccaatttaccaatcggtgtccgctttgcactgataataaccacttcttgcataatatccctcttcatctataagtctaattattactataactaaattttcatgaaacgtctggtaattcacaatttctttaacttttttttagaaatccgcttggtaagctgagattattttaccattttatcggcatcgtgcattactcattagcgtaagtcattcaccggtgacgcttacaactaatctttaggaggaatccacatgcaaacatcatggttagcaacatcgatcgcttttgaattacaaaatacagactatccaaatgaaagtttacaacgtcgtatgaccgccgtaaaagaagacgttcaagccacggaaatccaagcagttggcgaagccctcgcaagtctccacgcaggtgacacatttgcaacagctactctaaccactaaatctgcttatatcgctaaataaaaaacataccaatctttgaggaggaattcaagatgaaacaactttgcttagaatttaaaaacagtgatgctaagagtcgtgtattgcgcttaaacaatattgatgacaacttagacgccgaaacagttagaagtgcgatgactaaaatcgcagcagccaatatgtttattaaaaaaggaattgaactctacaaagaaccagttggtgccaaatacgttgaacagattgaaacaccaatcttttctgacaaataattaagcagcatacagcccccaaatcgaatctgatttgggggctttttttgcgttttacataaattgattaacaccccttgtttccgcgataaactttggtgtaggcttacataaagtcgttcaaaggagttatcatgcccaattcatttaacttatcgcaaatattgcaatcaatgttacttaattgtttactggtaattgcgctaccactagcttttgccgggattttaacactaatcaatcgttcaactaaacggcgcttagcccattggtgggattactcacaacttttaattggcggcctaggcactgtgattcatgaactcagccatgctgttgcctgtttaatcttccaacaccaaattatcgatatacaactcttaaaattaaatctacgggataatcccgatcactcgcttggccatgtcaatcaccgataccattccggccgtctttggccaacaattggtaatctctggattgggattgccccgatttttggttgttcagccgccattttcggactgacttggttattagcacggcccacttttgcaacgtggatgacctttgctgaacatcccacttggcagttaaacgccatcggccccttgttcagccagctctggacgacgcaaccgagtgctctcttgctctggttaatcttaactagcatgattgccatcggtggttttgacttatccgcagctgattttaaaggcacgattccagggattattgccacagtcatcgcggtctgcctcgttactggtctgttttcatttgtgccaacagtcaacaccacgacttggctcattggtattctaacaccaatggcaattatcctaaccatcgccgctagcttgtcgggtgtttgttggctgattattgccgggattttcgcactattagaaaggacgacttatcatgcgcgtcattgacttactacagctattagctgatacacccaaaaacgatggcatctacttcgaaggccctgaagagctccaacctatcgcccactttgagctcgccgtcgttgacgaacagccacgactattactgcagttaaaggccgcagacaaaaagccgctgaagcagtgggaatttagcctattattaaatcaaaaaaactactaccaacattatatgtatgtccaaacaaagacgggggactatcctttgtttggttttcgcgttgctgctgacaaaattctactcggataatgtttgttcaagttgcgttaaataacgatgactcgcaatcatttctcgtgcatcattttgatcggctaattgaatctcatagatcgaactagcatcaggatttaacaatggcaatacgcgggcccagtcaattttgccagtccctaattgcaacccatcatgcttcaaacccatcgaatcaaccagatgataatgaacgacgtgctcacgcaaagttgccagactctgcaagaaagcattctgatcaccctgcaacttgataaaacagtgactcgtatcaaacgctaagcggtaacctttatcaaagatggcctgatcaaaaatcggattgccataatagaaaatcggtgaaattgaattttcgaacataatattttgtccgccaatccgctgtaaataatcgaggcgcttgaacaaaacacgaatggcatccgtaatattactgtaacccgtcgtcaattcttcaattggatcatcataagagccatgcaccaatagttggacatcttcagctttcgctaactgcaataaatcgagtgttgattgccataaaaagcggtatcgggctggcgaacttgcttcattcatcgacagttcaatatgatgcccttcgaaactcattgggtggtgtaaaataatccgttcaacctgctgactgcgtacataacgaattttttcgcgtaaacgtactagcccagttggcgtgacatcttcggctgttagatgaaattcaaaatacgttggctgatactgcattcgatcagcaatttgctgatcgttaatccctgcttttaagcctaatcgcatcgtcatccctcttttctctactagttcctatttctattctaacattctaaagacctaagaatcgtaaaagcggctcaccaagtaatggtgggccgcttttttggttggcgttaaacgtgctttttgaaacgcacgctatgcatttagtaccttgttcaggaagtcttttgttctttcgttttgtggggtgtcaaagatttcctgtggtgtgccttgttcgacaatgtgtccatctgccatgaagatgacgcggtctgccacttctttggcaaagcccatttcgtgagtcacgacaaccatcgtcatcccttctttggctaaccgcttcataacggccaacacgtcgccgaccatttcaggatcgagcgctgatgttggttcgtcgaacaagagaatatcaggtttcatcgctaaggcacgcgcaatggcgacccgttgtttttgaccacctgatagcgattgtggttttgcatcgaatttctctgataaaccaaccgtttcaagtagtttcttggcggtttcttttgcttctgccggcgtcattttaccgagttccactggtgcgagtgtaatattttcagcgaccgttagatttttgaaaagattaaagtgttggaataccatcccgattttttcgcgaatttgattcaaatcactcttaggatcactgaggttgtacccatcaacgataatctcaccactcgtgggttcttctaagcgattcaagcagcgcaagaacgtgctctttcctgaacctgaggggccgatcatgacaaccacttcattatcaccgaccgttaagtccaaatcttttaacacttcgttactgccgtaattcttaataagatgagacacttcaattctattcattagttatctattctcccctcaatgtacttcgataaccacgtgagtaacgtgataacgatcagatagattaaggcaatcattgcccaaattttgaacccttcaaggttgcgggcgatgataattttacccgtctgtgtcaattcgagaatcccgatgattgataaaattgacgtatctttcaatgtgatgatgaattggttaatgaaggatggaatcataatgcggatcccttgtggtaaaacaacgcgccgcattgctttaccatatggtaaccctaaactccgcgctgcttccatttgtccggtgctaaccgcgccaatgccccctttgacaaaggctgcagtataagccccttcattgaacatcagcgtgatgaccccagccacaatcgctggaatcttctgcccagttaaacttggaatcccagtatagatgaataacgcaagcaccaagagtggtaacccacggaaaatatagatgaccgtatctgaaacgccacgcgcaaaccggttaggtaatacgccgagtaaaccgaagaagaccccaaaaatggttgcgaagaaaatcgcaatgactgttaataataacgtctggcctaaaccgctcaacaacgcatctttattttctttcaataatccaaaaaagctgtgatcaacggttgcttttttagttgattctgtacttaaatattttgctttaattttgtcgtattgaccatttgcttttaatttagcaagacctttattgaatttagcaatgagttcaggattgctccctttcttaacggcgaatccatattcgccaccttgagcaggtttggtgacaatcttgagtttcaagcccgtcttaatcccatattgcataacgggctcgtcttcaaaacaggctgccgaattaccattcacaacatcattatacatattatctgaatcatcaaacgtaacggtggtaaagccatattctttcgctttggccgtcgcataggccccagcggaagtccctgttttaatcgcaacacgtttaccgcgcaacccttctaagcctttaatcttactgtccttttgaacggccattacaaccccggtcttgtagtaaggatcagcgaaatcgaattttgcttgccgttcaggtgtaattgtcatcccggcaatcacgccgtcaatttgttccgactgaacggcttgaaccgctgcgttgaatcccaacggtttaatattcactttaaagccctcggacttcgcaactgccttcatgatatcaatatcaataccgacatattgattcttctcattcgcaaactcgaatggtggataggtcacatccgtaccgatttcataagttttttcagcggcttgaacctgattattcacttgactcccaaatacaaataagcctgcgagtaaacagctgcctaaaaatacgagtaatttcttcatgtgatcctcccctaatgcctgaccaacttctctcatcgctcttaacgcgttattaagattagattagacgttttataatagtatgttaataattataagcataaaatccaaatttgtcgaattttttaccacaatattgaaaagcagactctaatccctaaataatcgcattaaaaaagcccgcagataaggcggactttcactaaatgagaattgaatgagtttattttctgctataatggaagaactactactcaaggagtctactatgattaaacccattatgcgtgacactcaattcttagctcaaaaagcagttccagcaacaccagctgataccgatgtgctgaccgatttacgtgatactttacaagccaacacagaacgttgcgtcggaatggctgccaacatgattggcatcaataaacggattatcatcgttcaaatgggcgtcttacctgtgattcttgtgaatccacagattgtgcgtcaggataaaccataccaaacaactgaaggttgtctttcattgaccggtgaacgtccgacaacccgttatgaaacaatcgaggtcacttaccaagaccaatcctttaagccgcacaagcaggctttctcaggctggattgcacagattattcaacatgaggtggatcactgcgaagggcttatcatttaaaacaacaaaaaacgttcaaccactccaatgtacggagtggttgaacgttttttacaggttatttattttcttttttagtgtctttttttaattcttctgccaagtcgataatgtatttcttcaagtcatctttgacttctgggtgttttaacccatattcgatacttgtttctagataaccgaatttgttaccaacatcgtagcgccggcctttgaattcatgggcgaagacgcgttgggtcttgttcaattcatcaatcgcatcggttaattgaatttcaccaccaagacccggtttttggttttctaaaacatcaaaaatttcaggggttaataagtaacgaccaatgatcgctaaatcactaggtgccttatcaatatctggcttttcaacgaagttcttaacgttgtataaatcgtctttaactttgttttctgggttaatcacgccgtatttgtccacttcattatgtgggaccttcataacggctaattgtgatgcatgtgtttcttcatattcattaattagttgtttactcaatggcaccttatcatccatcaagtcatcacctaacataacgacaaaaggttcgtcagcaacgaatgattttgcaaggcgcactgcatcccctaatccgtttggatgtgattggcgaatgaagtacaagttaacccccatatcagtcgtttcgttgaccatcttcaacatagcggtcttattcttggctttcaagttttgttccaactctggtgctgaatcaaagtgatcttcaattgggcgtttgcccttaccagtgataattaagatatcttcaatccctgaagcctttgcttcttccacgataaattgaatcgttggtttatcaacaattggcaacatttccttcgccatcgctttggtagctggtagaaaacgagtgcctagtccggctgctggaataactgctttacgtactttcatctactaaaatcccccataacttatagtctaataacagtatgccataaaaaagtggatttgcaccaattatatgccgaaaatgaggaaaagattaacaagcgcttaggactttattaatcttttcacaattgttttgtaagcgattcccatcattggtattctcaagaggttaacaataaaggaggtcttcgatgtttctactacatcccaaacatatcaatacatatcacgagtgtcttcctgtgccactcatcatcaagcgcggtgttgattataacttctgtgagctggatcaatcgtcaattccccgttcttaccaaactagtattacgagtgacacaatggtgattattccctataaaaaatcgcaaagtcttgtgttagaccgcataaccggtctccaaattagtccgcgttctacccggcaactaatgcgcgcttataatcgccatcagatcatggacttctcacaaccccggcacctttgccattgtttcaattggtatcgtaagattccacacatcaatggcgaatatcagtatttaccattaagtggcacggctcatcaaaacgcaccgtggttagcgctccactacgtccgtgattacgaagttagcgataaccatctctacgttacattgctaaatgactgtacctgtatcctcccttataaaggccgtcaaatcgatactgaaattcatcaatgtgcagccattggcaaagtccaacttggctgtctcactgtgtgtgccactaatttcggctatcaaatcaagctcaagacttgtttcaagccaagcatcgtccatcgcttcgatgattgccattgccatctgtgctcgaatgttccgaaaacagctactgaactactcggattactcaacgcacttaaaatgcataaggaaaatttcatttaccaagccgtaatccatgaataccccgaattcagcgtatttgacattcagtgctatatcaaaagtgttaaagaactaattcaaaaattacgccaattataaattaacccgaagtcgctatttacaataattttcatttgtatttcaatgcatttgcgcaaattaaagctgaaacggattgatttaccgctaaaatcggcgattacccttctttatgcaaacccgctatagtgaacttaccggtaattcacactgtgagctcatagtagacaggatgctttacaatgacccaatcagatttacaaactgcttttgattttattatacaagacgacaccctcatctatggcgttctcaaagatctccacgttccaagacaacgtagcaacttcgccgatctctatcaaattggcgtcattgcctttgtcgaagcctacgatcatttcccaggcaatattgaagtcgaaacccaccgcttcatggtttacgcgtatcaggccgttaaatgggcgattatgatgaccttccgcaaggataataaccatgacaaacgaattggcttcgttaaccgggcaaacgatgatgattccgtgatggactatctcgaccaagttgctgatccctactgcaatccagaagaggctgccatctgtaacgacctcttcgagcgtctctatcaagtttgtacaccacgcgaaaaacgcttcttagtcctccgctacttctacaacgccaccctaaaagaaatcgccgcagacttaaacatcacacggcgaacggctaataatattaagtttaaggtgcaaaagaagtttagtgcgttattagtataattaaaaaaggtgagcaatcatatgattactcacctttttaattatactaatcgatttttgccataaatttttgtaatgcatcttgccaggttggtacttcaaatccagttgccttgatcttcgttaaatccataattgaatgtcttggacggaaggctttttggggatattcgtctgatgtaacaggactcacttcaacagctttgtccttcaagatttcactcgcaaattcataccaagtacatgaattgtcatttgaaagttggtataaaccataagggacgtcgtttttaactgaatataacatgaattcagccaatgtccgggtccaagttggccgaccgacttgatcactaacaaccgttaaatgatcatgtgttttagcaaggtttaacatggtataaacaaagttcttaccatattcaccaaagacccatgatgtccggatgatgtaatacttgctcatcgtatttgcaacggcttcttcaccagccaattttgtgcgaccatattcattcttaggtgcagctggggtttcttctgtgtacatttgatcattcgtaccatcaaagacataatccgtactaatgtaaacaagcgttgcgccgattgcttcagcagcattggcaatgttttgcgttccaaccacgttcactttgtaattgattgacttgccaggttcttcttcagcagcatcgacagctgtataagcagcacagtgataaaccaattccggcttattcttttcgaagtaagttgtgactgccgctgaatcagtaatatctaactcagtagcatctgtccccacgtattcaatttgattttcatctaataagtgccgtaattcggtccctaattgaccatttgcaccagtgattaaaattttcatgagtgatctcctcgcttgatataattcaataatttaggtttcgttaaccataatacaacgccgtataacaaaataccaacgccaacttgtaaaactagttgtaacatactaaatggtagcgttaggttcaaataaagaactacggcaaacatcatcagaccacctaaaaggtatttccacacttccgccgtcatttgtcgaatacttaactcatgccgaacgacatagaattgataggccgttacactgatttctgaaataactgtcgcaatcattgcaccttgtgtccctaaccataaaatcattggcacattcaagataatgttgacaacagcgccaaccgtcaccgaaatcgtaaattctttgttgtgtccggttggcatcaagtattgcacacccaagacattactccaggcaatcattagaatcacgatcgactcgaccatcatcaatggcccaacagcggcgaaatccttgccaaaaaacatggtcgcaaagttcggcgcaatcgctgcaatcccaaacatcatggggactgaaaccgcactgacaaaatcaaatgactggtaaagatactttttcacttgttcgtgatcacctttggcaaacgtattggcaactcgcggcaacatcacagttcccgttgctgtcacgattgctaaaaccattttgacaattttatcggaattatcatagaagccggcagcttcaaccgaaaccattttcccaaccatggtcttatttaagattaaatagacgtgtgtcgcaatttgcggaataaacaagactaaagatggttggaaatgccgccaaatttttaatttatgccagtcaggcatatcaatatagtgttttaaatatgggaataacgttaaattaccaatcaattgcgagattgataaaattgcaatgtataacgttaaatccccctggttcttcacaaatatgaagatacaggcaagcgagattaacttaatgatgatgtttcgtaaaaccgttaccttgaagttctcaaagcccataaagaaccacgagatatcaaatgctgccgcaacaatcaaaatcgcttgcatcaagtaagcttgatgatagtctttaacaaaccataaaaagccaaagaaaagtgctaatgcagccacaatcgtcactaatcgcattagaaaaacttcccaaaaaatttgagaagctttcgctcgattatctcgataataagcaatttgccgatttccatatagagataccccgatactcccaattaaaataaagtactgcgtatttgaattggtgaaggagttaatcccaacgcccgttgggcctaaaacccgggcaatatatggcatcgtaatgagtggtactaacagtacaaatacctggtagaacacattatagagatagttcttaataatcttcattgattaatcctttaattcgtccttaacgacttgtaatgctgcatggatcacttggtgcatatcataataacgatattggcctaaacgaccaccgaaaaccactttgggttctgtcgatgataggtcacggtaagctttgtacaaacggttattcttatcgttattgattggatagtaaggttcgtcgccacgcgaccagttagcgggatattctttggtaacgatggtcttgttcttgtcacctttaccgaattcaaaatgtttatgttcaatcacccgcgtgtatggtgtttcagcgtccgtgtagttaacaaccgcgttcccttggtagttatcaatatccatttcttccgtttcaaaacgtaagctccggtattcaagttcgcctaattgataattgaagaactgatcaatcatcccagtaaagatgactttatcgtattgatcaatatattcttgttttttatcgaagaaatcaacaccagtttcaacatcgattaaatcactatctaacatcttttcgatgatttgtgtatacccaccaattggaatcccttggtatgtatcgttgaagtagttattgtcataagttaaacggactgggaggcgacgaataatgaaagctggtaattcggttgctttttggccccattgtttttcagtataacctttgatcagttttttatagatatccgttccaattaatgaaatggcttgttcttccaaattttcaggtgttttatcacctaacaccttgcgttgttcagcaattttagcggccgcttcagcgggtgtcgctacgccccacaacttattgaacgtattcatgttgaatggcaagttatagatttcacccttgtagttggcaacagggctattggtgtaacggttgaattctgcgaattggttaatatattcccagatttctttgttgctggtatggaaaatgtgggcaccatattgatgtacttggatgccatcaacttcctttgtatagatgtttccagcgatgtgatcccgcttttcgattacttttacatggttcccacgtttggccgcttcatatgcgaaggttgcgccaaacaggccagaaccaactactaaataattagtcataaatatatacctcaccatcttttaaattatttgtgattttacgattcaaatagtgtctatagttaacaaagaagaaaaacattaaaataaataaatcaaatgaccattggatggataacattcctaatactaagaagataattgtgaaataaacggcactatcataaatcgcttgatcgtactgatatcctgtgatttgatgtatttgtaaccatttcgttgattttttcaaatcgagtaatagatgaataatatatatcacaataatgattccaataatcagcccaaattgcgctagcacagctccccacgcactttgatctggaaattctttattctttaaaaataattgatattcagctagttgtttaactgatgatggtgcattgatgaaattaaaatgactagtttgaccaaagccaacaccaatcaacggattctttaaaacagtaataaacaccgcttgtgttgctaatagccgcattgttgttgaatcagaatccgtcttaccaactgtaaaacttaataacatattttttaacgctggtactctcattacgattaatgctaataataatccagcaataacatacagaacgattagatttaaccgttcccgacctttgacagcccatagtaaaagtaacgccattacaacgactgccagaataccggtacttgtcttagcaagcaccaacacgcccatcaatacagcgaataacccataataaaaccagccatgatagcgactattcggaaaaaataggttgatcttatttttcatcgcgctaatgatgaagggggcaaaaccaatcgccaatactcctgctaaaaatccagattccgcatataacccatttacccgttgcgtactttgcgtgtaactaattttttcaaaagaaccaggatttagaatattatgatattccagataccgtccgattaattcgacgatactctctaaacgaccacctaaaaatacataaataatttgaaccagacaaatgccaatcaataggacaaatgcccaaaaattccccgttacaatctttttaatctgataatcattccgcatcaataggttcataacaaaatatagaatcaaaaaattagcaactgtaatcatcgcaataatgaacttctttaaaatactaccgattccatagccttcatttgttaatccaataaaagctagtagttggctaagtgcaagcaacccgatgaaggcatagtgtctaagctttaaattatccaacggttctaaagaaatatggtccactaaccgtcgataaagaataataagtatgcctaaaaaagcagcttgtgagaagaatgggatatttaaaatatttttttgaataacactaattaaaattaataactgttccataccctacctactatctaatattaatcaactcgtctaatctgcggattaaaccctaaaccagtaaacgtcccttttaagatagcaccagcccttttaaaacgactatccttagcttttcctaacgttgaaaatgcataaagaatatgacgaatggttaatttgatggttgccccttttcctttatataacttactgatgtaaattaagtttctatatagataaaaataccgattaatacgatccttcgaatcgttaaaaatagtaatatccgttaaattgttaggtgtcttgtgtaccacaacactgtcaattacaaaataagatgatttcgcctgactgactcgaattgtatactcagtatcatctccccagatgaaaagctcttgcgttggcacgccatattgttttactatttcccgggttaagaaaaccgaaacaaatgttccttggctgacagacactaacccatcattaatcttgtctggccattcaaatgcaggcattggcatattacatgatgtgccatccatccagcgaacattactacataagaagccaaaatcatcttttaagaatgctgctttatctaataactgatgtgctgcatttgaattaggaatcgtgtcatcatccataatccagaaatattggtcatctgtttgttcataagccatgaccatgccatgtgcaaaaccaccagcgccacctagattttcatcagaattcttgataataaacttatcagccgataaagttgctaaataatcagccgttccgtccgtacttttattattcacaataacaatgtgggcaacattttcatttttttctaatgctgctaaacattctttcaataatgctagtcggttataagtaactaagaccgcacaaatattacgattttttgattccataactaatcctctctgattgttgcgataatttcagcatgataatctggagcttccgattcagccacttgacttccaccttcaacttcattcacataccgatcatttaaagcaactctttgtgtggccttcatttgataccactcatactctaaatctgcgtgtcctatatcaattgcctgataaccaagcttagccaagtcataagccataactgttgcggtgggccctaatgcaattaaaatcaaagcatctgatgctacctgctccttaatgatatccataatagcgtcgtattgatcaaacgcattctgcgcagggcctaaaatgcgtttaacagacttagcattactcaataaatcattaccaacaccaaagcgcgttgcttgtccttctacaataactacttcacgatcttgccagatttgtttgagtaattcaaaataatacgccgtttgacttttatcacgtcggtcaatatagaagcgactcatgttcgcatcataaaatactgattgagcttgtaaataaggacgccaagcatgattgtaacgcgctattaattcaatccaagcatttttattttggggcatatactgactgagaccgttaaaaacatctggtatacagattgctaacttaggcgcatcagtcgctgtaataacctcttttaaacgttcactcaatgcttcggatccttcttgaaaagcatagctattctcattcaatagccactttaactcaccatcgccaaaacgagtgaccgacattttttgcactgtaatttgctttaaagtcgtttcaagaccaactacttttggtttatcagcagagcctcgatacttcaaatatcgtccaagcaaaataggatgttttaatcccatcacaatattgtacattggcgatgttagaaaacgattatacaaatttgtatttttaatcctctccatttattaaatcatcctattctgaaactatttatttttattgaccgtttttagcgtagttggcttccacggctgctttttctgcttgccaccagtcttcatgtacaataaaaaacatcaagaacagatatcctgtatcattgaagttcctacacaaacaatggaagaggatattgtcttgatgcagaaacaggataccacacaccgccaaaaaggtcagcacttaacatcactcgagcgcggaaaagtggccggattccgccaagctgggaagtccaatcgttggattgctgctgaaattggcgtctgcccgcagaccattaataatgaaatcaagcgaggtacagtagatcaggtcaagaagagtaatggcaagcgcgtctaccatcgacaatacctgccagaggctgctcaggcacgttacgagactgcacgcttgagctgccatcgtcctgacaagttcgccagcgtacaggtcttcttagcctggtacgtacagcgagctaagcaggacaaatggtcgccggatgcttcaatcggctatgccaagcgacacaagctgtttactcctgaagagcttgtttgtgcctcgactttgtaccagtacattgacgaccaacgcctagagattcgaaatatcgacctgttggagaagactaagcggaagacctctcaccagcaccacaccaaggctaagcgcctggctggccgcagtatcgaggaacggcctaaggtcgttgaacgacgcaggcagttcggtcactgggagatggataccattgtcggtaaacgcaatggcaaggagagcgtcatcttgactctgattgagcgcaagacccgttgccaacttctccgcttgatcgaaggacgagatgcagactctgtgagctatgcattgcgtggaatcaagcgcgaatggggagcttgcatcaagaccatcacagccgacaacggacccgagttcaccgccttaaatactgcttttgctgggacggaaactgagatcttctacgcccatccttacacgtcctgcgaccgtggcaccaacgaggcacataaccggatgatccgccaggacttccctaagggcatgtccctagatgacattagccctagagtcaagtgcaggccacgcaagaccgcttgaatcagttgcctcgcaaacaacagggctactgcacaccccagcaaaactttgaggccgaagctcggcgcgttcgccgcatggcccagtagtctctctagcgccacaacttctatttgataacggcctgttctgggattgtcctcaacgactggctaacttgttcttgcaatttacgatttttaatgttttagaatatttggtcaatataaaaacccccgatattggattttggtccaatatcgggggttcacttcagagacagattttgtcttagcctctttttttgtgttacttttcaggaagaactcgcctaccagctctccgtcttaagtctgatttataagcgaattacttgaaagtttgacctattttgactattatagaattagtcagaataatctgacacttaatttaaaaaataactgaaaaaggaatgacgtctatgaatccagaacaaatgacacaagctgtccaagatgcacttgcagaagcgcagaaaatcgcgatgacgcgtcatcaaactgaaattgatattccacacctctttaaatatttagtccaaccacaacaactaggacggcaaatttaccaagaagccggtgcagatatcgatgctcttgaggcggagattgatcgtgaaattgacgcaattccaacggttgaaggtcaaacgaattacggtcaaaacatctcacaaaacttgtaccaagtattaactgctgctgaaaaatacaaaacagaattccaagatgaatttttatcaactgagacggtcatcttgggcttaatgggtttgaaataccaggcactcgttcaatatttacagaaacaaaatgtcactgaacaaaaattaaagaaagtcattactgatttacgaggaggcgagcgtgtgacatctaaaaaccaagaagataattaccaagcgcttgaaaaatacggaacggatttaatcaaagcggtccgttctggcaaaatggatccagttattggccgggacgaagaaattcgagatgttattcggattttgtcacggaaaaccaagaataaccccgttttaattggggaacctggtgtcgggaaaacggcgattgttgaaggattagcgcaacgaatcgtccgtaaagatgtgcccgataatttaaaagataagacaattatttcactggatatggggactttaatcgccggggccaaataccggggtgaatttgaagaacgacttaaagctgtgttaaaggaagttaagaagagtgaaggtcggattctggtcttcattgatgaaattcacacgattgttggtgctggtaagactgaaggtagcatggatgctgggaacctcttgaaaccaatgttagcgcgtggtgaattacacatgattggtgcgacaacgttggatgaataccggcaaaatatcgaaaaagataaggcgcttgaacggcgtttccaaaaagtgctagttcaagaaccatccgttgaagataccatcagtattttacgtggtttgaaggaacggtttgaaattttccacggtgtccggattcacgataatgccttagtcgcagctgcgacgttgtcaaatcgctacattacggatcgattcttaccggataaggcaatcgacttagtagatgaagccagtgccaacattaacgtcgaaatgaattcacaaccaacggaattggatcaagcaacgcggcaattaatgcaacttgaaattgaagaagaagcgttaaagaaagaaaccgacgccgcttcgcaaaaacgattggctgagacgcaaaaacaattagctgatttacgcgaaacaacgaataatttaaagatgcggtgggaaactgaaaaagaagatttgaaccgcattaatgataaaaaagcggaaattgatgctgctaaacggcaattagaagaagcacagggaaattatgatttagaaacggctgctaagttgcaacacggcacaattccacaattagaagaagaccttgccgaccttgaaaaggctgaaaagccagaggactggatggttcaggaatccgttactgaaaatgaaattgcaacggtggttagttcccaaactgggattccagtcgccaaattagttgccggtgatcgacaaaaattactgcgtcttgccgatgttctgcatgaacgggtaattggtcaagatcaagctgtcaatgctgtgacagatgctgtattacgttcacgggctggcttacaaaatccagaccgtccgcttggctcattcctcttcttaggaccaacaggggttgggaagaccgaattagcaaaagctttagctgaggatttatttgattctgaacggcatatggtccgcattgatatgagtgaatatatggaaaaatattctgtatcacgattggtcggtgccgcaccgggctatgttggctatgaagaaggtggccaattaactgaagcagttcggcggaatccatacacaattgtgttattggatgaaattgaaaaagcccatccagatgtctttaacattttattacaagtgttggatgacggtcgtttgacagattcacaaggacggacggttgactttaagaatacaatcatcattatgacttctaacttgggttctgaaatcctactggacggtgtagatgaagaaggtcaagtttcacaaacggctaaggaaagtgttcaagccttaattcagacgaaattcaagccagaattcttgaatcgaattgatgatacaattatgtttacaccattgagcttgaacgatattcaagcgattgtggtcaaaatgcttcatgatctatcagaccgtttgtcagatcaagaattgacattgacgatttcagatgctgctaaacaatgggtggcagaagaaggttacgatcctgcatttggggcgcggccattacggcgttttattacgaaccatatcgaaaccccattggctaaagaaattattgccgggcatatgttaccaggaaccacggttgaaattaacttaaaagataaccagttagtttttgaaaatcgctaacgattgaaaaagcgctacaaatttaatttgcggcgctttttttggacatcaatcagggattattactgtcagattgatgtttgtatggtacacttattagggatgatgtacagaatgttagtgacgattaaggacgattccactttgaaagtggtgtcattaagagtcgttaatcaattgtttttctgtaattgacttgctcttagcggataaacatagtattatagaagtcgcggacaaaagtagcgggacacgtgatgatttaaaatcaatttgaatgggattgagataatccttgccaaattccccgagttcggtatatcattaatgaatctaagatataaaggagtctgaaaataatggcagttccagcaagaagaacatcaaagacgaagaaacgtatgcgtcgtggacatatcaaattgaacacaccaaacgtacaattcgatgcaactaatggcgaataccgtgtaagtcaccgtgtatcaccaaaaggtttctataaaggcgaacaagttgttacaccaaaagctaacgactaatcgtcatcgagagtttctgaataagaaactctttttttatgcagtttcctagttttaaatactagatggtggtataatgagtattgaataaaaggagattgataattatgaaaaatgaacacttgaaacaaaagctcgatcgtttacaaattgtacgcttaccacgttggacagacctgcccgatttggaactatatatggatcaagtggttagttacatcaatcaatacctaaacgcgttaaatttagatgaaatcaccgcttcaatgattaataattacgtcaaaaaagaaattgtggcagcaccgattaaaaaacggtatacaaaatcgcaaattgctcaagttttaattattgcactattgaaaacgagtttttcgattgaagaaatcaaacaattgatgacagcggaaacacctaaccgaaatgaaaagcaactttatgattactttatcttaacgtttttagcagcgattcatcagttagatgaggattacagcccctatgaccaaggcaaaaatccagcaggtacattggtcactgaaacccaacaaacattgctgaaattagcatgtcagagtgtggtatataagattgcaattgggattactttgaagaaagaaccagttgaagaaaaaacgccagcaaaaaataagtaattgactagaaaatgagaattgaattaagattcacaaataattcaattacaaaaataatgaattcgtttacctctttctattttcgccgtaaaataaaggtaactaattagtttattaacaaatgttagttaactaatttttattcagaggattaatcattgtggttaagtctgaaaaaaatgaaagaggtgttttaggtggcagaaaagaagaagacgaataagttaacgcttggtgcgcttattctaatggtctttacgtcagtctttggatttacgaatatcccacgtgcgttctacttgatgggatatgcatcaattttttggtatgttttagcagctgttaccttctttattccttatgcatttatgctcggagaaatgggagcggcctttggtgaagcaaagggggggatttactcttggatggagaaatccgttaacgctaaatttgcctttgtcggcacatttatgtggtttgcttcatacattatctggatggttaacgtcgggaacgggatttggattccattatcaaacgcctttttcggggttgataaaacacaagaatggtcaatctttggtttgacaaatggtgtgcaaacattaggaattttagctattatttggatcattgtcattacctttgtcacatcaaaaggccttgataaaatcaagagaatcaccagtattggtggttcagccattacgttaatcaacgtgattttattcttgggtggtttgttaatccttgttttaaataaaggggtaatggcacaacctgttacaacccatgcattcttccaatcaccaaatcaaagctatacatcgatgattcaagtcttcagtttcgttgtatttgcgatcttcgcttatggtggtcttgaagttgttggtggattagtagatgaaactgaaaacgctaaggttaactttccaaaagggttagctatttctgctgtcgtgattgttgtcggctatgctgttgggatctttatgatggggactttcactaactggaacttcgtctttaccaatggtggtggcttcgccaaagcaaccggttcaaacgcaaccgttactttggggaacgttgcttatattgccatgaacaacatgggttaccaattagggttagcaatgcacttaagtgaacatgctgctattcaagttgggatttggctcagtcgttacatggggctttcaatgttcttagcacttagtggggctttctttacaattattttctcaccattaaaaacaattatcgaagggacacctgctgccttttggcctaagtcatttactaagaaaaatagtaataatatgccggtcaatgcaatgaaggtccaagctgcaattgtaattgtgattattgccttcgttgcttttggtggtaagagtgctgctaagttcttcgatatcttaacagcgatgacaaacgtttcaatgacattgccatacatgtttgtggcatactcatactttggctttaaaaaggatgaaagtatcgaaaaaccatttacaatttataaagggaagaccttctataaattctgtgtctgcatggtcatgttcacagttggttttgcgaacgtctttacgattattcaaccagcaattgatggtaatttaagtcaaacaatctggtcagttgctggccctatcttcttcacaattgttgcattatatatgtttaaccgttatgaaaagaaaacaaatttaaaataagtttttaaaagagcggccgttaagtggtcgctctttttgattggtcttaaaaaatgtgacacttcgtcgttttcgcttgaattgtgattctaaaagggttaatctaagatttcaatgagttaaatttcaatgaaaaggtgacgaatatgaaaaaaacaattgttggtttagtgaccagcttagggctaatcggtctattggctggttgtgggacaaccaaattaacaacgactaaaacaaattatcgccaaaatggaatggtggcagtcgtaaaaggttcaacaaccaaaaaagctgatttacaataccggattaatcataatcatttccaaaaagcaacggtcaaagacggaacttatgtgattcaagtaccaacaacgactaacaaacaaacagtaacggtacaagctaaagcaaacggtaaaaccgttcaaaagaaggtaacgattgcagcgggcacatcagttggccaatatgccaagattgccgcgcaatacaaccaggctttaattgggatggcgttatctaaggcagatcaaaccaaagcgcaggaattgcaaaaacaagcagcagctgccaaagcaggccaacttgcacctgctgatctgatgacacttaagcagcggcaacaggaagtacaagcagcaatgcaacaggtgcaacagacacaaaaggatcaattgctaccaaccacacctaaaaatggggtgactgaatgggtcgcaacaaagcatgtcaccattcgcggttctgttgatagtcaagatgtaatggggatgacgctcattacacccgttaaagcgctcaaagataaagcggcattgaaagattttgggaccagttttgcattgattgcgcaagcaacgggcgctgattccaaaaaagtgatgtccgaatttagcgattatacgaagaaaaacaaaaaaggtagtcaaaccacgatgaagacgattgaatcaaatggtgtgaagttcaataccggtttttcaacaagtgatttgtatatttacattacaaaataaacgtaaaaagggccgcaacataaagttgcggcccttttttgtgctttatttagctggatcttttggtaagacaagaggtaagaagttgagcaaaagcccaaaaataactgagacgataacagttgtttgaatgttaaagccggttttcgttagtttagaaccgataaatccaatgacaaacccaaaaatcaatgtccaaagtagattcataacgtatttcatagttggccttctttctttgattcaattctatgatattgtaacacgttttccaaagagaatcatttgaaataatttgttatactaagagtaatcgaattaacgaagaaagaaggggcgttgcttgccattcgttcaactacaggttaagagtacctatacgctcttggaaagtaccactaaaattgatgcactgattgaaagtgctaaggcgcgcggctatcagagtattgcgctgacggataagaacgtgatttatgggctagtcgatttttataaggcggccaaggcagctgacttacatccaatcttgggtttaacgcttgaaattggcggattacttcaaaccgatgaacggtttccgctaattgtattggcgaaagatttagttggctatcagaatcttttgaagctttcttctaaagtgatgactcaaactgatctggtttcatttgctgatattacacagtggttcagccatttagtagtgatcacgccggctcaagatggcgaattagtccgcctacttttgcaagcggaggagcaaacaacggcatatttgacgcaactccaggcggcagttgatccggggagcttgtacttaggaatcagtgccaagcgagcagcagccccccaacttagcgggttaattgcattgagtcagacgaccggagttccgctggttgcattaggtgatgttcgttatctagaaccagatgatgctttttcagtgcaagtcttacaacatattaaagctggtacgcaagttaatctccatagtggtgatcagacaacgccaggcggctattatttacagactgctgatcagattacggccgagtttgaagcattgcagttggtcgaggccgtgcacaatacggataagattgcccaactctgtcaagttgagttgacctttaagcgggcccaattaccacgctttgaaacaccgcatcaagagtcggcaacggcatatctagaacagttaagtcagcaaggcttacaagttcggtttgccgatcaagcgattccgcaagaatatcaagaacgcttgcagtatgaattgcgagtgatcaacgagatgggctttgccgattatttcttaatcgttgccgatgtcatgcggcatgcccatgaacaacatattatgacgggcccagggcgaggctctgcggcagggtcgttggtggcctatgctttaatgattactgatgtcgatccgattcaatatcaattgttgtttgaacgttttttgaaccccaatcgggcgaatatgccagatattgatttggatatcccagataatcgtcgggatgaagtgctggcctatgtctatcacaaatacggtcggaatcatatggcgcaaattattacatttggtacactggcagctaaaatggcgttacgtgatgtggggcgtgtgtttggcttaagtcagtttgaaatgaatgattgggctaaggtaattccggacatgctgaaaatcacgttaaaagaagcttatcaacaatcacaaccattgaaaaatttggtggccgattccactcaaaatcaattactattcgagacagcacagaaacttgaaggactgccacgacactactcaacgcatgcggctgggattgtgttaagccaagcaccgttaactgatacggttgcattacaaagtggcggtgaagagattgaacttacacaattgccaatgggcaacgtggaagaactgggcctactgaagattgactttttaggattacgtaatttagggattcttgctaatattgtaaagcttgttggacagcaaaagggacagctgtttgacccacactcaattccgttggatgatcctaaaacacttgcattattccaacaaggtgatactaatggtattttccaatttgaatcacttggcattaagaatgttttacggcggttggcaccgagttcttttgaagacgtcgtggcgacaaatgcgttgtatcgaccaggtccgatggaaaacatcgacgtatttatcgctcgtaagaacgggcaagaacctgtcacttatccggacgcgtcgttagccgatattttagagccaacgtatgggatcttagtgtatcaagaacaagttatgcaggctgcgtccaagatggggggctttagcttaggcgaagccgacttattgcggcgagcaatgagtaaaaagaagaaggcggtgattgatgctagccggacgcaatttattcaaggcgcactcgaacgcgggcacacagaaactgctgctacgacagtctacgactatattgagcggtttgccaattatggatttaaccggtcacatgctgttgcttatagtaaaattgctttctggttggcttatttaaaagttcatcagccagcagccttttttgcagctttattaaatgccgttttgaacaatccgacaaaaacgaaaacttacttagcagaagctaagaaacgtcaaattaaagtgctgccacctgatattaaccgcagtcaaagttatttcagattagccgactcagggattatctttggtttgttcagcattaaaaaagttcggcgcgattttgtggcggcgattattcaagaacggacaacgaacggaccgtttaaatcgttactggccttcttacagcgtatggatcctaagtttctcaagcaagaggcattagaagccttgatttatagtggcgccttcgatcagtttaatccgaatcggaatgcgctgttgaccaacttagccgacctgcttgatagtgtgaagttgtcagggaataacgtcgatttatttgctgttttagcaccgaaagaacgtgccgtaccgaatttaaccttgactgaacgattggataaagaagccgaatatcttggggcctatgtttcggggcatccggtcgaaaaatatgattgtgtacgccaacactaccatgtgcctgatatcagtgatttggcacccgagcaaacggtccatttggtgctattcattcgccgaattaaggtgattcgaacgaaaaaaggcgatcaaatggcgtttgtaacggggcaagatgcaaccggtgaaattagtgtgacgctctttactggcgtttatcaacgggtcagtgaatggctacaaacaggacaagttgtttttatcaccgggaaagttgaacaacgtcgcgatttacaagtggttgctaatcagattcaattggcacaagatgcacaaaagacgctacccaaagcgaccctttatttacgggttcaaacggcgttgacgagtcaagtgcaacaacaaatgtatcaattgttacaacaaaatcacggaacaacgccagttatcttgtacaatgcggccgataaacagtcaattctattgaacgagcgctattgggttgtgagcaacgaaaaactaacgaccgcgcttacaaaccttttagggacgggaaatgtgattttaaaagggtttgaccaataaagaaattggtctatctttgcgaaaatcttcgcaaaagacaagacttattttctgaaaagtgataatatattagtgactttaaaagaccaattggttttttaagtaaaatatttgcctggggtgaaaagatgaaacgcataggtattttgacaagtggtggggatgcacctggtatgaacgctgccatccgtgccgttgcaagaaaagcaatgcatgaaggccttgaagtctatggtatcaattatggttacgctggtttagttgccggagatatcttcaagatggacccaattacggttggtgacaagattcaacgtggtgggacattcttgtactcagcacgttatccagaatttgcacaagtcgaaggacaattgaaaggtattgaacaactcaagaagtttggtatcgaagctttagttgtcatcggtggtgatggttcttatcacggtgcacttcgtttaactgaacatggttataacgcaattggtcttccaggaacaattgataatgatattccatttacagatcaaacaattggtttcgatacagctgtgaacacagtgctcgaatcaattgaccggatccgtgatacagctgctagtcacgaaagaactttcgttgtggaagtaatgggtcgtggcgctggtgatatcgcgctttgggctggtgttgccggtggcgcacaagacattattatccctgaacatgatttcgacgttaaggccgttgctgataagctacgtacttcacgtgaacatggtcaaaaacacgctgtcattgtattggctgaaggtgtgatgcacgctgatgaattctcagaaaaactttctgaatacggcgatttccacttacgttcaactgttttaggacacgttgttcgtggtggggcaccaacagctagtgaccgtgtgttagcaagtcgtttgggctcaaaagcagttgaattattgcttgaaggcaaaggtggcgttgcacttgggattgaaaagaacgaaattatcgcacatgatatgttagacttgttcaatcacaagcatcacgcaatgttagatctttatgatttaaacgaagatttagcttactagattcatcgttccatatataaaattgttaaaacgactgaaaagtcttttaaaaaatagacataaaaggagagattccacttatgaagaaaaccaaaatcgtaagtacacttggacccgcaagtaacaatgttgaaactatcacaaaattaatcgaagcaggtgctaatgtattccgctttaacttctctcatggtgatcatgaagaacatttaagccggatgaacatggttcacgaagctgaaaaattaactggtaaaacagttggtatcatgttagatacaaagggtgctgaaatccggacaactgttcaacaaggtaagaaatttgaattacacactggtgaagtggtacgtatttcaatggacgatacacttgaaggaacacctgaaaaaatcgctgttacttacccaggtctatacgacgacacacatgtcggcggacacgttttaatcgatgatggtttagtggatcttaaaattattgaaaaagacgaagcaaacaaagaacttgttactgaagttcaaaacgacggtatggtcggctcacgtaaaggtgttaacgcacctggtgtttcaatcaacttacctggtatcacagaaaaagatgctagcgacattcgttttggtttagatcatgaaatcaactttatcgctgcaagttttgttcgtaaacctcaagatgttttagatatccgtgaattattagaagaaaaacacatggaacatgttcaaatcttccctaagattgaatcacaagaaggtatcgacaacattgacgatatcatgaaagtttcagatggtttaatgattgctcgtggtgacatgggtgttgaaattccatttgaaaatgttccttttgtacaaaagaacttgatcaagaaatgtaacgctattggcaaaccagttatcacagctacacaaatgttggactcaatgcaagaaaacccacgtcctacacgtgctgaagttaacgacgttgctaacgctgttattgatggtactgacgcaacaatgctttcaggtgaaagtgctaacggtgactacccagtagaagctgttgcaacaatggctcgcattgatgaaagaacagaaaaatcattaacagaccgcgatgcatacgcattgaaagcatacagcaagactaacttgacagaatcaattggccaagctgttgctcacactgcacgtaacttaggaatcaagacaatcgttgctgctacagaatcaggctcaacagcacgtatgatttctaaataccgtccacaagctgacatcttagccgttacattcgacgaacgtacacgtcgtggtttaacagttaactatggtgtatacccagttatcgctaagaaacctgctaatacagatgatatgttcaacttagctacacaaacagctcaagaacatggttttgctaaagaaggcgacctaatcttgatcactgctggtgttcctgttggcgaacgtggcacaacaaacgttatgaagatccaattaattggttcaaaattaacacaaggccaaggtgttggcgatgaaacaatcgttggcaaggctgttgtcgcttcaaacgctaaagaagctgctgaaaaagcaattgatggtggtatcttagttgttaaatcaactgacaaagattacttaccagcaatcgaaaaatcaagtgctatcgttgttgaaaacggtggtttaacatcacacgctgctgttgttggtatcgctatgggtattccagttgttgttggtgctaaagacgcaacagaagctatcaaagatggcgaagttgtgactgttgattcacgtcgtgggattgtttaccgcggtgcaacaaacgctctttaatcattcctgaatgatgaaatgaagccccctctgaaaagagggggctttttttgttttaaaaatgcgaatcttgaattacttttctgaaagtactgacaagtcgttcatttatcggtacaatagtagggagactttattggaggtttacatggaaagttggttatttttagtagcgattttaatcgttgcattgttagcgaaaaatcaatctttaatcattgcgaccgcggttgttttaatattaaaggtattcccgatttcaaataaggtgctgcctgtgatccaagccaaaggcattaattggggagtgacagtgatttcggttgctatcctagtcccgattgcaacagggcaaattggtgtcaaagacttaatcaatgcctttaaaacgccggcgggttttattgcagttggttgtggcgtgttagttgctgtactatcagcgaagggtgtggggctattgtccgctagtcctgagatgacagtggccttggtttttgggaccatcatgggtgtcgtttttctaaaagggattgcggctggccccgtaattgcagcggggattacttataccattttaacggtctttaatttagtaccaattcattaattaataagaataaaagaggttaactatgaatgaattaatcgggcaagtcattactgccttagtaacagatgaaaatgaaacagccttctttgtccaaaaagacggcgtgacatttgaattaaaaaaagaaactttagaacaagaattgacaatcggtgaaacggtgactggttttgcttatgaaaactcaagtcgggaattgatcttatcaacgtttattcctaaatcacgcgtgggccattatgcctttggtgaagtggttgaaacgcggcgtgatttaggcgttttcgtcaatattggcttgccagataaggatattgtcgtatcactggatattttaccaaccattacgaaattatggcctaaaccaggtgatcgtttaatgattgcgattgaagtcgatcaaaaagggcggatgtggggccaactagctgacgaaagcatcttcagatcaatttcaaaaggtgctaaaccagaaatgaagaaccaagacgtgatggggacggtctaccgtttgaagttagccgggacgtttattttaacggatgacttttacattgggttcattcatccttctgaacgtgaagcagaaccacgtttgggtcaacaggttaaggggcgcgtcattggtgtgcgacctgaaggtagtttaaatgtcagtttgaaaccacgggcatatgaagaaattggcgacgatgctgaaatgattatggctgtcttaaaacggcaacctgattacgcaatgccatacactgaccggagcgatccagaagcgattaagagttactttgggattagtaaaggcagttttaagcgggcattaggccggttaatgaaaaatggcttaattactcaagcagagggcctaacgagtttaactgaaaaaggtcaagctgatattgccccaattacagatgacgagaagcaagactaagcttttttgaatgattgaaaaggaagttgctaaatggataaagctgagcaattagaccgaatatccgagcagctacaagcggccggctacaagttaacagcacaacgctctgcgacggtggcggtcattttggaccatgcccaagcgcatctgagtgccgaacagatttttatggcaactaaagaggtggtccctgaaattgggttggccactgtgtatcgcacccttgagatgttgacggaactgcatgtgttgaataaagttcggttcattgaagatgggatgacccactatgacttgtgtgagactgatcacgaccatcatttccaccatcacctgttgtgtctgcaatgtggggcaatcgaagaaattcatacggatttattgcctgccgtggaacaacaggtatatgatgattacacatttacggtgttagatcatcgtttaacatttcacgggatttgtgcacgttgccaacagattaaccaacaaaatgggttaccagccaatcaactggatcctagtcgccaaattgacgtgacgcagttgtaaaagaggaagtacatggatgatttaattcaagattatttacattatttaaaagttgaacgcggtctttcggagaatacgcgccagagttatcggcaggatttacaacagtttgcggcgtttttacaacgtcagcaggttgccaattttactgaagaccgctttttaattttgaactacttgcaagaacaaactgatgtgcataaggcacaaagtagtattacacggagcatttcaacgttacgtaaattctatcagtatttagcgcgtgaaaagcagattaaacaaaatccgatgctccaaatcgattcgcccaaacaaggccgtcatctaccggctgttttatcgacggcggagattgagcgactattggcggcaccagatacgagcaccgcacttggattacgagatcgagcgattctagaggttttatatgcgacggggttacgagttagcgagctgattcatctaaagatggctgatttgcatttatcactgggcttaattcagaccctcggcaaagggaataaggaacggattataccgattggtgatgtagcggttgattggattaatcaatacctcgatcgtagccggaatcaattaacgaaggggcgtgctaacccgtacctgtttgttaatttccatggtaacgggttgacgcgccaagggatttggaagaacctgaaggcacatgttaaaacggctgggattgaaaaagacgtgaccccacatacattgcggcattcgtttgccactgtgctacttgaaaatggcgcagatctgcgaattgtacaagaattattggggcattcagatatttcaacgactcaaatttacacgcatattagtaagaaacatttgacagaagtttaccaatggagtcatccacgcgattaaattagatttgtcgcgctttataaactatggtagagttaatgctattagaactttgtttgatcaatggaggtcaacatgttattcaagtataaaaatgattatgaaaagattgcgatgggctttttatccttcgtaccggatttaaaagaagtcagtcatgtacaagctgaattggcgctctatacgtcggatgagcaacgcaatttatatttatggcgcaatgaagccggcgattttgccggtgttgtggggattgaactgggtgcggactatattttagtgcgccatatttcactgaacccttcggaacgtagcgacgagaactatttcaccatgttggatgaattagcggcgctttatcctgaaagtcgcgtgatgggttcgttagagactgcgccattgattgctaaatgggaacaacatcagaatacagaaatggactagattgaccaatgactgaacaattaacgttggtcttgactgattttgaaggaccactcgatttattattacatttaattaagcaaactaagattgatatttatgatattcccattgctgaaatcaccgcgcaatatcttgattacttgcaccaaatgcaagtattgaaactagatgttgcaggtgattatttagtaatggcggcgacgttgatgaagattaagagtaagttgctcttacctaaggcacctgaattaattgaagaagaaacagaagaatacgtcgatccacggcaggaattagtggaccaactattggcgtaccaagccttccaaaaggtcgcaacggttttgcaagagcgcgaattggagcgccaacagctctttgctaagccagctagtagtaatccagctgaaaaagtggtcccactggcgcgcggcgtgattaagccacgcgatttagcggccgcagtttctaaaatgttggtcgaagcccaagctaaacaaccggtcttcaaaacggtccaaaatgacgaaatttcgattacggataaaatgagttggattgtgcgtcatttagccgctcaaccagttgcttttgaagcgttggtcgttgttaaaacagatcgagatgaaatcgtcacaacatttttagccgtactagaattgatgaaggatcgaaaaattatttgcgaacaagccgactatgatgcaccaatcatggttcggttgaaggagggcatttcagttgaatcatctcgctgaaattgagagtttattatatgtcgcgggggacgaaggaattgcgcttgcgcaaattgcgcagcttattcatctcgatgaaccggcagtccgccagttattagaaaaattggcaaatcgttaccgcggcaacactgaatcgggtttgaacctgattcaagccgaagatatctataaattagtcaccaaaaaagaatacgcgacgttgttgaagacctattttgatggaccggtgtcaactagtattagtcaggccgctcttgaggtattggcaattattgtctatcgccaaccaatcacgcggattgaagtcgatgaggtccgaggtgtccaaagtagtggggccatccaaaccttgttagcccgccaattaattagcgaaaaagggcgtaaggatgcgcccggtcggccaattttatatggaacgagcacctatttcttagattactttggtcttgaatcgctcgatgaattaccaccacttgaacaattggcacttgacgctgatgtcgatggtagtgaaggtggtacagcagacttgtattaccgtcaatttgaacaaacgttaaatgaaacagatacgacgtcggaagagacgtccaaaggagaacaataaatggaacgattacaaaaagtgattgcaaatgctggggtagcttcaagacggaaagcagaaaccttaattgcaactggtcacgtcaccttaaatggtgaagtggtgaaggaaatgggtatcaaggtggatagcacaagcgatcatattgaagttgacggtgtgccgttaacgcgtgaacgcaaggtctattatgtcttgtataaaccacgccaagtgatttcagcagtgacagatgataagaaacgccgggtcgtcactgaataccttggcgatatcgttgaacgggtttatccaatcggccgattagattacgatacatctggcttattactactaacgaatgatggtgattttgccaacatgatgatgcatccaaaatataaagtcgacaagacttatattgcgaaggtttcaggattaccaactgcagatatgttgcgccaattgcgtaaaggaattgtcttagaaaaacgcaaaacagcaccagccaaggtcaaagtaatttcaactgatcggcgtaagaacactgccattgtaagcatcaccattcacgaagggatgaatcatcaggttaagaacatgctagctgcggttggcctacccgtaacaaagttgaaacgggaaacatatggtttcttaacgttagatgggttagtttctggcgaataccgtgctttgaaaccaatcgaagtcgcagaattcaaaaaaattgctgaactaaatgaaaaaccacagcataagaatcgaccaaaattatcacggcatgattaattagttgcttttggcacgttgatttgctatgcttatttcgaacaaaatattaatggttcgtcttcaggggcagggtgtaattcccgaccggcggtaaaagtccgcgacctgctacaatgttgattcttgtggtggctgaactggtgtgattccagtaccgatagtgaaagtctagatggaagaagatagggcttatttgggtatgaatgtatgcaagtaaggtctgttaatctccctgattaacagacctttttgatgcaatcagacttggctaagtccgctgacgaaggcaacctcatctggagggtgttagtaatgcaagtttcaaaagttcgtacgatgattggggtcgcaatgctaggggcaatttcatttgtcgtcatgtttttcgaatttccaattattctcgcatttccgtttttaaaaattgattttagtgacgtgattgtcctgttagggacgttcgtttacggaccaattggaggaatgggggtcgcattgattcgctcgacgcttcatttcattatgaccggtgctagcttaccgagtttggtcggcgactttgccggtgtcttggcgtcaatctgctacttgttaccattctattatttattcaagcgtcaatcgaacgttttagtaggtcaagcaattgctggtgttgcgggggctgtcagcatgacgatcttcatgtcatttgctaactggcttttcattttaccgctctatattaaattgatgggtttgaacttaggaatgtcgactaccaaatacattctatttggattagtaccgtttaatttaattaaaggtgcactcgtaacggtggtgtttgccgttttatatttacggattttaccatggctaaaacaacatatgcaaaaaccaattgccaaataaatggcagcaaaaaaggttgtgtccaagcgggcacaaccttttttataggacgtaaatatgctacgataaaaatggcgttgattggcgtacaatcgcaccagttggacaggcggtgtaggcggttttaaacgcaattcgttctttaggatcttcaattggcgtcgttccctgattatgatcgggtttaaaaaaggcgatcccttcttgatcgtaatcgaataagtcgggcgcctttagctggcagagaccgcaggcgatacagcgttccgggatgacttgactatagagcattaaattcacactttctcaataaaggacttaattgatgatgttaatggcgtatctactatgcttgttggcgcctgagaaaaggcggtatcaagcaatctactataccttaattggtaaacgaactacttcaaatctgtatgccggtttagcatatggattattaaaatggctccaaatttatcctaatctagaacaggcacaatttcaagcagaattaaaacgacttcagcaaaatggttggattgaaatcgatgagcggtatgtttggttgactgctaccgggcaacaaaaacaagctgaatggcagccgcaattagtttggccgacgcactatgaaggcccacagatgggtcacttaccccaattcactgctcgttttatgttggccgttcaaattgtgtcggaatatcatcatcaaaatacgcagtactatccattggaaacgagtatgaaggaccgcgtgttggtggtcagttggtttaagcggcataaggcaaccatcaattttagcagtcaattccagctagaattggcgcaattacttgaccagttagatccgcaacaagccgatcttgtggcaaatcaactgatcggacatcaagtcttgggcaaaagccaccaacaactggcgcaagccttagatagcccatccttgacagttcgtgtgcggaccatcgacgcctttgctcaaattttagggcttttattggcgcaccaaacgacttatccgctattgaatgaattagtggatcaggctgaaacgcaattgagtcagagtacgttacagacctggcaattgatccaacaaggggcgagtgttaaacaaatcagccgccagcgccgggttaagatcggaacgattaaagaacaccttttagaaaccgcgatgttactcccacggtttccgtttgaacaattcttaaaggatgcaactacacaaaaactagctagattgatgactgaacagccatcgctcagctataatgaagcacaaaccgcactccccggtctagatttctttgagtatcggctttatcaaattcaaaggcaggtgaacgcccaatgagcacggatgaactgatttataaaacgctaaaagagcggtttggctatgagacatttaagccaggacaattagaagtgattcaatctgttttggcgggccaagcgactttggcggttttgccgaccgggacgggaaaatcattatgttatcaattaccagcctatcttttgggccataccactgtcattatttcacctttaattgcattgatgcaagatcaggtcgcacagttgaattaccaaggtgaaaaaaaggcagtcgcgattaattcaaatttggaaccgcggcaaaagcatgcgttattgcgacaattgccacagtatcgtttcgtgtttatggcgcctgaaacgataagccagccggcggtcattcaagcactacaacaatgccagattgatttattggtcatcgatgaagcccactgtatttcacaatgggggattgattttcggccggattatttagtgcttgcgcaaatcaagcaccaattaaatccgggggcaacgctcgcactaactgcaacagctgatgcacaggttcggcatgatattttagccaagctagatttgcagtcggccaataggattattacgtcggttgatcgtcctaatatttacttaggggtgagtcaacaagcggatgaagcgagtaagcacgcctttttgcaacaattggtaactgagagtcaggggcccgggattatttatttttcaagtcgtcaaaagaccgtcgagattgcggcttttttgcaacaaaagacagcgatgcgagttgcctattatcacgcagcgctttcgccacaggagcgcttcattattcaacaacagtttatgcaagggcagttggacgtaatctgcgcaacgaatgcatttggaatggggattaataaagccaatattcgctatgtgattcactatcatttaccgcaaaatatcgaaagttatctacaagaagtcggtcgtgcagggcgcgatggccaaccagcctatgcaatgttgttagcaacaccgcaagatacgtatctgcaacagtcgttagtgtcatttgggattcctgaagctggattgattcggcgtttctatcaagaaccgacattatttaaacaaagccaaggcaacgagtttgaattattacggcggtatcagcaaattgggatggatgaacaggccgttagtgaactgttacagaatcggcaaaaagaaaagcgttttgcgcttcaaacaatggttgattatttaaacttacaaggctgtcggcggcaatttattgtgaactattttgacgagcaaccccaacaggttgcccatgctgatcaatgttgtggtcaacaggattcaacggtctttttagaaaaatttaatttaaaaacgttaactgatgataaatcccctaaaatagacgggttagaccattgggacggtattttgaagcaattgttttagagattttctgggtattttaaaagggtctatggtacaatatcaaagaataccaatagggagggccgtcaatgctcaaagatgataagaaaaaattagataatcagacggaagacaaaccctgggaaagccagtttgatgatgatcgtgatgatcgcgggaatttatcgcgtgttgcttccaagagtaaggaaaaaggaaatacatattttgccattattctaggtgtattgcttgttttaatgattgcatttccgattattgcctatacgattcattctagccgggctaaccgcccagtcgagtctagtaagattgtcgttaatacttctgatagtgatagtgcttctaagaaagaagctaaaaaagcgaagtctgctagcgaaagtgctaccaaagcggccagcgaaagtaaagctaaacaggctgaaagtgaaaaagcggctagtgaaagccaagcagttgaaagtagcaaacaagctgcagaagaagctgaaaaggctaatagtcaaagccaagctcaagcagacgctcaaaatagtagtagcgaagaaacaacaactgaaagtagcagttcaagcgaaacaacgggtggttcttatacgttgaaagccggcgaaggtttataccgcgcagcggttaataacggtttaacactcgatcaactacttgcattaaaccctgggttaacagccaattcacaagtggcaccaggcacagctctaaaagttaaataatcagtactaccaaaaggcctggggaaactcccagccttttttaatgattttttcaggaggcagaacatgcaaattgcaattgatggaccagcatcatctggtaaaagtacggtcgccaaaattgtggctactaaattagggttcgtatacgttgatacgggtgctatgtatcgcgcatcaaccgtgttagcacagaagttagggttagacttcggggatgaagcgggaattttagcagctttaaaagaagcagatatccaatttaaacctgaccaagcagggcaaaaagtcttcttgaatggtgaagatattacattagccattcgaacccctgaaattacgaataatgtctcacaagtatcagctttagctggtgtgcgcactgagatggttgcacggcaacgtcagattgcagatcaaggtcaagtcgtcatggatggacgcgatattggaacaacggtgttacctgctgcgaaggttaaaatttttatggtggcaagtgcccaagaacgagctaaacgccgttatgctgaaaatacagctaaggggattatgacgcctttagcaacgctacaagcagagattgaattacgtgatcaaaaagatagtacacgggccatttcacccttaaaaaaagctgacgacgccattgaaattgatacaactcagttaacaatcgatgaggtggtcgacacaatattagcaattgtaaagaaaaatatgtaattttatctttgaacgaggtaaaataactggtaatccgaatagatatcaactaaaatagtaactgtatagatagtcgttaaggaggattttagctatgagtgaagctaatttgaataacacccaaagcagcgatgcaatggcagctgctttagacagtgtccacgaagtcaaaattggggacgttgttaaaggtgaagttttagcaattgaagatcgacaagtgattgtcggcatcgaaggaactggtgttgaaggggttgtgcctcaaaaagaattatcaagtcaacctattgaagacatcgcagacgttgccaaagtaggcgaccaattagatttagtggtcatttcaagaatcggtaacgataaagaaaacgggagctacttattatctaaacgtcgcttagaagcccgtaaagtttggtctgaaattgaacaaaaatttgctaatcaagaaacaatcacagctaaagttatcgacgtggttaaaggcggcttagtcgtcgatgctggtgtccgtggcttcgtaccagcttcaatgatttctgatcgtttcgtacgtgatttaagcagctttaaaggccaagaattaaccttacaaattattgaaattgaaccaagtgaaaaccgtttaattctttcacgtaaagcattattggaacaagaacgtcaagctaagttacaagcagtttttgaaaaaatgttacctggggatgttgttgaaggtgaagttgctcgtttgacaaactttggcgcattcatcgatttaggtggcgttgacggcttagtccacgtttctgaaatttcatatgatcacattaaccaaccttctgatgtcttagaagttggtcaaaaagtgcaagtgaaagtcttgagcttagaccaagaaaaaggccggatctcattatcaattaaagatacgcaacctggtccttgggatgatatcgctgataaagcaccagttggtagcactttagaaggggtcgttaaacgtttaacaacatttggcgcctttgttgaagtcttccctggggttgaaggtttagtgcatatttcacaaatctcacatcaacatatcgccacaccaaacgatgtgttagaagaaggccaaacggttcaagtcaaggtcttatcagttgatcctgaacaacaacgtttaggtttatcaatcaaagcattgcaagaaaaacctgctggtgctaaggattcagaacacgaagatgtggcgccttctgactatgtgatgccagaagaagaaacaggtttcagtatcggcgacatgcttggtaaaacattagacgataaataatttttttaaaagtcatatgcaaaaaggtagggtctgggacaaaactaggttttgtcccagaccctacgtttatgtcggtgattgattagtacgacgcagaggaagcggaagttcagcggactttgtcggagtgaccttgtcagtttggctcagacagggtacactgaacaacgaagggaatgaatacaatgacaaaaccagttatcgccattgttggtcgacctaatgtcggtaaatcgacgatttttaatcgcattgccggtgagcggatctcgattgttgaagatacgccaggggttacgcgtgatcgcatttataccacaagtgaatggttagggcatgaatttagcctaatcgataccggtgggattgaaattagtgacgcaccatttatggaacagattaaacaacaagcagaaattgcaattgatgaagcagacgtgattatcttcttagtgagtgcacgagaaggggttactgatgcggatgagcgagttgcacaaattttataccgcgctgacaaaccgatcttacttggggttaataaggcggataatccagaacaacgccaagatatttttgatttctatagtcttggctttggcgaacccatcgccgtttcaggggctcatggtcaagggttaggtgatcttttagatgccgccgttgctaagttcccagctgaagatgacgaagaagaagacgatagcatcaagtttagtttgattggccgtcccaatgttgggaagtcatcacttgtgaacgcgatgttaaaagaagaccgggtaattgtctctcaaattgaagggactacgcgggatgccatcgatacgaagttcacggctgaagataatcaagaatttaccatgattgatactgccgggatccgtaaacggggtaaggtctacgaaaatactgaaaaatacgccgtaatgcgtgcattacgtgcgattgaccgttcagacgtcgtattagtcgttttgaatgctgaagaaggtattcgtgaacaagataagaaagtggctggctacgcacatgaagctggtcgtgggattatcatcgtggttaataagtgggatacacttaaaaaagacaaccacacgatgaaagagttcgaaaatcacgtgcgcgatcaattccaatacttagactatgcgccaatcatctttgtatcggctaagaccggcgttcgcttgcaaaacttgccagcgatgattgaacaagtgagtgaaaaccaaaaccggcgcatccaatcagcactcttaaacgaagtcttgatggacgcaacaacggtgacaccaactccagctattaatgggaaacgattgcgcatttattacatgacacaagtagcggttcaaccgcctacatttgtggtcttcgtaaacgatgttaacttgcttcatttctcatatcaacgtttcttgaagaatcaattacggaaaacctttgactttactggtacaccaatccatttgatccctcgtcaacgaaaataagctgttttttcaaaaatccgctaatatgattaactaatttgctcagaatgctgttttttagcgaaattccttgctatcactaggtttgtgtgataaattaaaaaatgaaatggtgatcaaatcattgtttcgtcatttttgaccactcaaaaatggtttcggtaattaattactgattatctgtgatgagcaggaggtgaaaaacatggcaaacaaagcacaattgatcgaaggcgtagcatcaaagactggtttaactaagaaggatgcaactgctgcagttgatgcagtatttggttcaatccaagacactttgaaaaaaggtgacaaagttcaactaatcggctttggtacttttgaagtacgtgaacgtgcagctcgtaagggccgtaacccacaaactggtgcagaaattaagattcctgcaagcaaagtacctgcattcaagccaggtaaagcattaaaggattctgttaaataagaattcaatttataggctgggatttttcccagtctttttttattggcaattaatccgaatatgttaaaatggaacaatcgaaaaagggtggttaaatgacgaattcagaacaaatgcttacagcattagaagataataatttagaacaagcacagacttacttccaacaagccttagttgctgatgaacccgatacgctctacagcttagctgaagagttatatgcgatgggttttttggaacaagcaacgacaatttaccaacaattgttggcccaatttcctgaagaagatcaaatcagaacaacactagcagatattgcggtcagcgatggccaatacgacgacgccttgaacttgttggcagatattacgccagaatccaatgcgtacgccgaaagtctgctgacggcagctgatgtctatcaaacaatgggcttaccagaagttagtgaacaaaaattattgacggcgttgcgcttatatccagatgaacccgtcatgcaattcgcattagctgaattgtactttgaaatgggtgaatatgtgaaggccgccaattactatgagacgctaatcgaccaagacgttgttgaactgggacaggtgaatattcaaaagcggttggcaactagttatgccagcagtggggcttttgaagaagctttgcagatttacgaagggttgacgccagaatttctaacagaagacgatcaattccagatgggctttttgtacttacaaattaaggattatcaaaaagcaattgaaatcttaaccaagttacagacgactgatccacaatatacgtcactatatacttacttggcagcagctcaagaggctcagaatcaattagaagacgccttaacgaccgttcagaccggaattgggtacgatgcctacaacgaggtcctctatcaaaaggggagcgatctagcgcttcaattaggcaataacgaggttgctgaacagatgctaaacgaggccctcaagattgatcctgataatatgggcgaaattagtgccttgagccaagtttatcgccgtcaaggccgccatgccgaaaacattgctttcttacaagatgcgattgaaaatcataaaccaacggctgatttatattggtcattggcgcaatcacagatggcggtggatgatgttgaccaagcgcgcgaaaattatctgttagcttatcctgacttgaaagataactcggactttctacacgatttaattttattcttccaagaaatggcacaggtcccagaaatgttagcggccctcaaacaatatttgaagctcgtgccaaacgatttagagatgcaaactctctatgacgattaccaagccatgcaataatgcaaaaaaacgcccgactattactttagtcgagcgtttttttgcgtctttagtcgcgtttcttccccagatgaaagtggtacattgaagaggaatcgggaacaggatttatttggggaggtttttaggatgacaaacacaatactttcggttgcccaactaacacaagtggtgtcaattgggcagtctgaccagacgacaaccttattgaaaaatatttcgtttacggtgcaaaaaggggagttggtcagtattgttgggccttctgggtctggtaagagtacgttgttgtattgtatttcagggattacgcgacctacaggcggcactgtggcaattgcggggattaatccgtatcaattgaaacccaatcaactagcggcttttcgcagacagacgattggctttatttttcaacaatacaacttgattcagtctttacccgtctttgaaaatgttgtcttacaacagcgcttgagtcatcagcaaccgcaacgtgctgagattaaacagttactgaccaaaatgaactttgcgggacaaatcgatgggcctgttgcgactttatcgggtggtgagcaacaaaaagtcgcgattgctcgcacgattctaactgattgtgatgtgctatttgccgatgagccaacgggtgcgctagattcggcatccaaagcgattatttttacatatttcaaagagatggttgctaaagggagaacggtgattatggtgacccacgatattgagctggctagtcagacagatcgtgcgattgtattaaaagacggtcaggttcagcaaattgtgactgaaccgacacttgcgacaatctatgctgccttggatcaggtggtgtaagcgatgtggacaatcagttggttacagttaaagcattcctggcggcaatggctagcaacaataccagtttttgtaacagtgggtttaatcctcggtttttgtttaacgggaattgtgaatgtggcacagtcgcagcaagttgatctatacggtccgaatacaccgttgccgatttttatcatgccggtattttttggtggtattacaatggtaatcgtgattaaagaagtcgtgcaccagcttttggatcagtttaaaacggactatcgaatgcttgcgattctaggggcaacgatcaatgcactggccgctattttggggatttaaatcggaattgtcagtggggtgagtgctctgctcggcggagtcgttgccttgccactaacgcgtttttgttatgcgtggttgcagcagattgttgggccccaaatgttgccgaatatgccaattcatttttcgttcttggcacttttgttaacggttgtcttggttagtctaattgccggtagtggtggtttttggcatgcacgccatcaactaaaagatgggaataagcatctcagtcaccgacggcggatcgttcgtagagttaggacgattgtttcgttaatggtcgtcagtgggttaattattaaactaacgatgcaaagcatggcgttaacctatgtcggtcattccgagaaagcaattggcagtctcggcaattcggttggcaacctgaatctcgtgttgttcttattattaattctaattgcgcttaccggacacacggtattaaaattaattagccacgtgctctattggttaggtgctagaacgctctttttgaacatggcagcccatgatattgactatactgctgaaaaatatttgccgttgtatacgccagtgacggtcattgcggttttaattacggggatgtcggcaattatgtggaatataccggcctatacaaataccacgagtgccaacaatgaacgtttggtgaatttcattttgacaattggtttatatttgggcgcgccgttactgattgtattagcgaatgtattggcgacgctgttagtcgcaaaagaggataatgcccagcaaatgcgccaattacagttgctcggtttaacaaaacagcaactattgctgacacaacaatcgcatgcagtgatcttagttggtgtttgtcttgcagtcagcctactagccgggggcttagtttggagcctgacgattcatgtcgggcgaaccattttgtaccaagcacccatctcaatggcggctttgctcgctggaccgtttttaatggccgttagtatgctttgcctgctaacgatagttaatttagctcgtgtttattgtgggaaatgtttaactaaagcataaaaaagacagctagtgcatttttaagtgcattagctgtcttttttattggttttgattgcggttaagaatgtcctgcgcccacgcgcaccattctaattctgttgcgcagaccattaagcgccgtttcaaaatcaggtaacgacctaagtttttttgcttttcggtgggatcggttatgaggttgtattcttgcatcttatgttggtattgtttttgaattttttggtaatgatggcggcgatcttggagtaagtcagctgcttgttcttgattgaacagtgaaataacgtaaacttttgctaaaaactcgtcacgttgtgtgggtaaattcgtttcttcttgaaaccagtcagtaacgacgagttggccggcttctgttaaatgataaatcttcttttgtttatgaacgggatcaattttaaccgtgacatagccttgttcgtgcagtttatttaatgccgtgtagatttgactgtggtgtgcttcccaaaataaattaatgtactgctttaattcgtagccgctacacggtttgcgaactaacatacataataaaatatagctaagcgtactcatattatttcaccctttaatcgattaattattgctcagtataccatatttagagtcaacaaacatgtcactatattatgtcaaattttaatgtaaaaattgatatgttttgcaatctaatgtagtttatataaagagaaagagagtgatatgttgctggagaatcaaaataaagggctacgctcggcgtatgccgttgcatttacgtgtatggttgcatttatggggattggtttagttgatcccattttaaaaacgattgcggttaaattaaatgccacaccagcgcaaacgaccttactatttacgagttatatgttggtcacagggattattatgctatttacagggtttatttccactagaattggtgcgaaaaaaacgattagtattggtttgatcattattgttttatttgcggcgttagctggtcgttcacagaccattacgcaattaatttcgctacgggccggttggggctttgggaacgccttgttcctatcaaccgctttgactgcgattgtcagtgtgatgcctgaaaaaacggaacaagcgattatgttatacgaaggatctttaggaattgggatggccgttggaccacttgtgggtggcgtcttagggagtctttcatggcgttttccgttttatggtgtcgccattttgatgtttattgcggcgttgaccatcatggtttcattagaaccgattgctaaacctgctaaaagggcgcttttttttgcaggggctgtcgcgttaaaaaatcatcgtttacgttcaatcgggattattgcattattgtataatttcgggtttttcacgattttagcgtatgcaccattcttattagttgggttaactgaattgcaagttggttttgtctttttcgggtggggcgtgatgttagccattgcatcggttttcattgcaccacggatggaacaaaaaacgaatacccttgtgacgttgttgtttgggttaagctttttcttgatctgcttaatggtgatcggtatttatgcagatcaaccagccttagtggcctttggcgtcatcattgctggtttcttccaaggcttggtgaatacgttgttaacgacggttgcgatggaaaatgattcgattgaacgcagtgttgcatcatcggcgtatagctttattcgctttactggcggggcaatcgcaccatttgttgctggtaaaatcgctgagaaatggtcagcgcattggactttttattttgcgagcttaatgattttaattgggattttctttgttctgcgcaatcaaaaatattttgtgacggttgaagaagttgaaaaagaaattgagttaactgagggacaggaattatcataaagacacttaaaaacgccagcgattaatcgctggcgtttttattgattagtcgtacgtaaagccttccccgagtgcttcgtgcacatcaataatggaaacgaatgcgtgcgggtcatgttggttaatcaaccgtttaagataggcgatttcacttggactgacgacacagtacagcattggtcggtcttgatgggcataagcgcctgtggcctgtagaaacgtcacgccgcgttccatatcggccagaatgtcatcggcaattgcttgcgcgtggtcactgattacgagtagccctttggcggcgtaagcaccctcgagtgtgaagttcacaatccgggagaagacgtaagacgcaattaaggtatacatcatatgttcgatatcgaggtaactgagtgagagtgttaagactacgacgtcaaaaagaaggagggagcggcccattggcatccctttttctttttcgataatgcgggcaatgacgtcggtgccaccagttgtgccaccgaagcggtagataatcccactgccgaagccactacataaaccggctagaatagcggcgattaaaatatcgtggtttaaatcaattgtgatggggacacgttgccaaatccatagaaaaacggacatcatcgccgttccgtaaatcgtgtaggcgagtgcgcgtttaccgaggtaacgatagcctagaataattagcgggatatttaacaaagccgttgaatacgccgggtcgatatgcaaccaataccgtaaaatcaaggtaatcccggttaagccaccttcagccaggtgattttgaatgttgatggtcactagcccaaacgcgtagatcgcacagcccagcgcaatcaccgctaaatcacgactagtcgtttgccaagtatgttgtttcgtcatgtcaacgccccctttacataactcaaatatagcacggaatgggggttaaaaacagttggaaccactttggtggctgaagtggggtccttgattgtggtatgataaatagcatcagaaacagttaattgttagataagagggatagccatgaaagtaaccacctttgcgccggaatttgaagcggccctaccaatcttaaaacaaattgaagcggcgggttttgaagcctatttcgtcggcggcagtgtccgcgattatttattaggcttgccgattcacgacgttgatatcgcaacgtcggcgtatccagcagaagtgaagcaaatttttaaacgaacggtcgataccggaatccagcacgggactgtgatgattcttgatcatgggactggctatgaagtgaccacttttagaacggaaagtggctatcaagattttagacggcctgattcagtgacgtttgtgcggtcgttagacgaagatttacaacggcgggatttcacgattaatgcgcttgcgatgcgcgctgatggtgaaattattgatttattcgatggcctgaccgatctaaaagcgcaacaaatcagagcggtgggcaaagccgacgaacgtttccacgaagatgcactccgtatgatgcgtgccgtccgttttgaaagtcaactcggctttgcagttacaccagaaacacaaactgcgattgccaaacatgctgaactattaacgaaaattgcggtggaacgcattcatgtcgaatttgtgaagttgctacaagggattcagcggcaaaatgggttacaaacctttttaaaaaccgggttgtatcaatattgtccagcgttcgcgactgaagcagcggggctgaccaaattagcggcattaccagcgcaacagattcatgatgaagatacggcttggctactagtcaatgcattattgggtaaaacccccgccgccgccggcaaattattgaaacgctggaagagtgctaacgatgtgatcgatgcggttaaagcaggtttgggattattgccagccattctagaccaatcagccgatcagtgggccctttatcaagcggggcaacatgtattagacatcacgttaattgttgcccaattaatgaccaacgaatcagtcgcagttgatcagtggcaagcaaagtatgcggcactgcaaatcaagcaaaaggcggaactcgccatcaatggacaagtcttaatgcaaaatgggtatcaacctggtccgcaactaggaaaaatgttggcgcaactcgaaaaatccgtggtgttagatcaattaccaaacgatcaagcccaattattgcaatcggctgcacaaaactaagccattccctcagaaggtgtgttaaaataaccatgtaagcacattcagaaagggtgacaattgatgacacaacatgtttttaaggaattgaaattttattttagaaatggtgacgcttggaccgtcagccacaaagaattaaatgatatttggattagccgtgttaccaccagttatggccgcattaatggtggcccaatgcaagagattcacccttgcaagagtttcaaagccgaaatcttacctgaagcggatcatgtgaagtccgaagacatcaacaccggttctcttgaaatggggatgttcggtcgtgcaacgaagtatcaagacatcgaaaaactcgatttaatctttgaagatgatcaagatcgcgcaccaatgcaaatttatttcccattcaagaataaagataatagtggcttagataatatttatcaaagtagccaaatctcacaaaaaaatggtcggttgtacattgtgattgatgcagaacacacaattgcagatatgtaccctgaaatttaaacgttagctcctgacaatattgatcgttgtcaggggcttttttatttgtttacagtttacgacattctttttgtcattttgattgtcagtcgtctgattattcgctatgattgatggtaacgaaagtaaaaaggtgactatattgcaaacattgacagcaacgcatttaacgaagacttacggcgaaaaaacgctttttgaagacatttcatttttaatccgtgaaggggaccgcattggtttagtcggcattaatgggaccgggaaaacgacgttactcaacgcgattaccggcacggattcatacgatagcgggcaggttgaaacgcctaaccaatacgcgatgagttatttagcccagaaaccaagctttgatacgaacttaagtattatggcggcgatttttgccggcgataatccggttttcaagacgattcaaaactatgaacgcgtcttggcggcatatacgcaagatcccactaatccgaagttacagacgcaatacgaacaagctgatgcgcaaatgacgcaacaagatgcttggacggttgatacggatatcaagacgattttgacgcaattacatctaacggatttggatcaaccgattaatacattatctgggggccaacaaaaacgggttgggttggcacaagccttaattgaaagcccagacttattgattttggacgaaccaacgaaccacttggattttgattccattgaatggcttgaaaaacgcttagcacaatatcaaggcgcgcttttaattgtcacgcatgatcgctacttcttggatcgtgttgcgaaccaaatttttgaactcgacggtggtcaactctattcatataacggtaactatgaacaatttttaacccaaaaagctgatcgcttggaacgtgaacaacaagctgcccataagcaacaacaactctacaagcaagaattaacgtggatgcgcgcgggtgctaaggcacgaacaaccaagcaacaagcgcggattaatcgcttcaatgacttaaaggcgaatttaaccactggaccagacgattcggaagtcgatattcagatggggcaatcgcggttaggtaaaaaagtactcgaattaaagaacgccagtttaaaactcggcgatcgtcagattttggatgactttagtattctagttcaagcgaatgatcggattgggattagtggcgtcaacggggccggtaaatcatcactgttaaacgtgttggctgaacgcctcccacttgatagtggcgagttaattgtcggcgaaaccgtcaacctcggctactatacgcaacaaaatgaagacttagatcctaacaaacgagtgattgcatacttgcaagaagccggcgaagaagtcattggtaaaaatggggaccggatcagtgtcacacaattgttagaacaattcctattcagccgtcaaatgcacggcacattgattggcaaactttctggtggtgaaaaacgccgcttgtacttgttgaaaattttgatgcaacaaccaaacgtcttattactggatgaaccaactaacgatttagatattggcacgttgacgattctggaaaattacttggaaaactttaacgggactgtgatcacagtttcgcatgaccgttacttcctcgatcaagttgccgacaaactcttgatttttgaaggggccggcaagattagcaccgaagttggcctgttcagcgattacttggcaaaacaaaaagcaacaccaactaagtcagcgcctaaagcagcgacagcatcggttgaagaagcaccagttgcaaagaccaagcagaaattaacatacgccgaacaaaaggaatacgaacacatcgaagccgacatggaacaattggacgaacagattgaaaccatcaaagcagaaatgaacgcaaacggcgcggactatggtaaattagcagagtggcaggcccaaatggatcaacttaaccaacaactagacgaaaaaatgacccgctgggaatacttaagtgaatacgcaaactgagtgcgttcaaactggtcaggaggttctgagcatttacctagttaggcgaattagcgacgcagtcgatgatttggctaacgtagtaaagcgcaggaacctagtttgaaaagcacgttaaagaaaagaagtgcgttcaaaccggttatgttctgaggattagcctaacaaggcgaatgattgctggaagcaatcgtttgacttgtgtagctaaacgcaagaacatggtttgaaaagcacgttaaagaaaggaatccacatcatgtctgagcaaacctacttagatttagaacgtaccattttagaaacgggtcattataaagaagatcgtaccaacactggcacctatagtctgtttggctatcaaatgcgctttgatttaaacgaagggtttcctttattaaccaccaaaaaagtgccattcgggttaattaaaagtgagttattgtggtttttaaaaggtgattccaatattcgttacttactacaacacaataatcatatttgggatgaatgggcgtttgaacgttacgttcaaagtgccgattacacaggcccggatatgacagattttggtcatcgtgcccaaactgatgcggccttcaatactgtttatcgcgaccaaatgcaacagtttaacgaacggattttagacgatgaagcctttgccaaacaatatggtgaactgggcgatatctatggtaaacaatggcgtgcttggcaaacccgttctggggacacaatcgatcagattaaaaacgtgattgaacaaattaaaaccaatcccgattcacggcgcttaattgtctcagcttggaatccagaagacgtgccaagtatggtgttgccgccttgtcatacgatgttccagttctacgttaatgacggacggttatcgtgccaattgtatcaacgcagcggggatgttttccttggcgtaccatttaacattgcgagctacgcattattgacacatttgattgcgcatgaaaccggccttgaagtcggtgaattcatccatacgttgggtgatgcccatatttacagtaatcatattgaacaggtgaagacacagcttcaacgcccaattcatgccgcaccaaaattgtggctcaatccagataaaacaagcatctttgattttgatgtcgccgatattaaacttgaaaactatgaagcagaacccgcaattaaagcatccgttgcggtttaatgaggaggagcgccaatgttagcattcttatgggctgaagatcaaaatgggttaatcggtcaaaatggtcacttaccatggtcattacccaacgatcttgccaattttaaacacgaaacggttcatgaagtggtggtaatgggccggaaaacgtatgatagtttacccgtccaacccttacctggacgccaaaacattgtgattacgcgacaaccggatttagctgtggctgatggggtgtttgtgatgcacaccaaagcggaactgcttaaatatgagcaagccaacccgatgaaaaagatttttatcattggtggtgccgatatttttgcaatgtacgccgatgatgtcgattatctgtacgttacaaaaattgctgaatcgtttgaaggcaacgtttatatgccaaaattagcgatggatcagttcgaattgatcagtcaaacacctggtgtggtggacgaacgtaatcgctatgcgcatacgtttgaaatctatcaacgccgttagaaagattcaattaagggcggtcgcagcgatgtaaccgcctttttgcttgctacaaaagtgacaactggctttttttttaatcagtaacttttggtgaaaaaagcgtgattgtttgatatactgtcaatagacataatcatagaaatcacggggccgttgattgcccagatttcaagatagaaagcgtggctgaagtaatagtggctaatattaaaattgtaacggattcatccatccaactcactcctgaagaaattaaagaacatcatattacggttattccgttgacgattatgattgacaatacggtgtatatcgatggtgaaaccattacccgcgatcaatttatgactgaaatggcaagtgcgagtaccttacctaagacgagtcaacccgcaatcgggaattttgtcgaaacgtatgaacaattagcggctgatggcagccagattttatcaattcacatgctacgagcaattagtggcactgttgatacagcccgccaagccggcgagatggcgaaagcagatgtaacagttgtcgatagcgactttaccgaccgtgcaatggcattccaagtgttaaaagcggcagaagtcattgaaaacggcggtagcatggatgatgctttagcagccattcaaaacgtacacgatcatacgaagttatacatgggtgtgactgatctaaccaacctcgttaaggggggccggttgagtcatgcggctggtgtgatttcaagtttattaaatatcaaggtgatccttgaagtggctgatagcgaattaaaagtgttacgcaaaggccgggggatgaagaccattacgaaattcatcgatgaaatggaagctgatatgcgcgacttaaagattcgggcaatcgggatttcacatgcggatgggctagaattgagcgaaaaaattaaagcacaattgcaagtagtattcccaaacatcgaaattcttgtccggacaactgatccagtgattgcaacgcatgcgggtgcaggcgcatttgccgttatgtactacacagaggattaacaagattacaattaatgtattaacacactaaggctggttgacatttaattgtcccagccttaactattatctagaaataaccgaggtgtcacgtttgaagaaagcacgacagattttaattgatttaggcttatttgctggtgcgattttagtggtctttattatctggcaactattaacgccacggcccaaccaagcgcctaagacggtaacatcaacgtcttcagcggataaagtgatcaaatcaaaaccaaaaccaaaaaagacgttgcagttggttgcgattggcgattcattgacgcatggtgttggtgatgagaccaacaaagaaggctatgtgtcattagttgccaatcagattcagcaagcaaccaagcatcccgtcaagaccgccaatttcggtgtgacgggcgataccagtgtacagattactaaacgcgtgcagaaacaaaagccgctacagcagcaattggcaaaagctgatattgtgacgctaactgttgggggcaacgacctaatggcagttttacagaataatttttttgagctgaatcaacgtcggattacgactggtcagcaaaaatatcaagcgaatttaaccacgctgatgatgcaaattagaaaatataatcctgatgccccaattttcatcatgggggtctacaatccgttttatgtctatttccctgaaatcactgggatgtcaaaggcggttgctgagtggaatcagaccgccaaaacggttgctaatgatttcaaagatacgtattatgtcaatagtgatcggatgttgacacggggcgatgggcattttgtcaaacagactaaatcgctcgctaaaatggatagtgcacagttgcaaaaaacattagcggctaacgagcatttgaacccctataccagtccagatgatcatttccatcccaatcataaaggttatcaatgggtcacaaaggccttttggcaagtgatgaaagcacacaagcaaacgtgggattagagaaaggataggttatgacaaccagacaagcacatcaagcagcacagaaaacaacaactaaacggaccatcaattattggaaatacagtttcatcgtcttattagcagtcgtgatcgggacagttggtcttgtcggctacaacgtgacagcccctaagactgaaatgattaaaactgagaaaatcatcaaagctgatagcacttttgaaattcagatgcataagagacaaatcaatagtttagtcacctattatttacaaaactacttggaagattcaaagattaaataccaactcaccctggatcagcaggcgattttatctggtcaattcaagttcttagggtttccggtcgaattcaacctcttttttgaaccgtacgttttagaaaatggcgacgtccaattacgcgccaaacaattagcagtcggacaattgaaggtgcccatgtcgtttgtctttaattacatcaagcgtcaatacaaattccccaaatgggttattttggatgcacacaagagccggattacattacgcctaaatgagttcaagctcgaaaacgggatgcaagtaactgctaaacatatcgatttgaagaatgataagattgatttaaacgtctatatcccgctaaaaaataagaaataaggtgttcagatgaagcagagtttttatcgttacctcatgacccaacgtgatccgaataattatgaaccagttccccaatttgccaacaatgccttttttgaccaatctttccctaaacaaagcggcgattatgaaacattaacgcgctatttggaacttaatggcagctacctcccgagtatgacgatttttgatgaggcgtatgaagcctatcaggaaagcgaacaagcctaatgacttccccgaagcagaaattgtggcggggatgggccattaccggctattggcttctcgcatttttactggctgggacggtagcgattgtgttacggtcgttcattctggtccccgcatcggtgtcagggcaatcgatggccccgacgcttgagtcagcggaccaactcttattacgcactagtgggcccatcaagcgctttgatgttgttgtcttcacccgagctgatcaaacaacttatgtgaaacgggtgattggtctgccaggtgaaaccgttgcataccgcaatgaccagctgtacatcaatggacggcatgtcgacgaaccattcttgaatcaggccaaaaagaaaccagggattttaacatcagattttgaattaaaaaccttaatcggcgaaaaacagattccaaaagatgagtactttgtattgggtgacaatcgccagattagcaaagatagccgtttgtttggtacgatccaccgcgatacaatattaggccgagcagtggcggtctactggccgattaaagatatacaatctttaaaataataattaaaagctgacatactctagagtgtgtcagcttttttgattatcgagtgctaatgatcgtatgaaatgtactgaatatgatgcttaactgaaaaaatgatacgcttaattggtggatgttgtagtccggaattaaatttaacccgtcagccagacatcaggtatgatagaattaagaataatacaatcagtgacaaatattaagaatgatgtatatcgcttaactagcaataaaggagttattatgacaattcaatggtatccaggccatatggcaaaggcccaaaaacaaattaaagaacggctcaaagcagtcgatttgattctcgaaattgtggatgcacgggttccagaatcttccattaatccgatgattgcagaacttggtcaaaacaaaccgacgctcttgattatgaacaaagcggatatggcagatgccaaacgcacacaacaatggattgaaacatttaaaaaacgggggattacagcaatcgcgcttgatgcgcaacataaatcaaaattaccgcaaatcgaaaaagtagcacaagaaattttggcagacaaacttgctaaaaaacgggcaaaagggattcttaatccggtgatccgtgcaatgtgtgttggggttcctaacgttggtaaatcaacgattttgaatcgcttggtgcaaaaaaacattgcggtaacaggtaatcgacccggtgtaaccaagaatcaacaatggttaaaagcgggccaatcactcgaattgttagatacaccaggggttttatggcctaaattcgaagatccagctgtcggcaataagttggccttaactggtgcgatttcggatgcaatttatcacccggatgatgttgtggtgtatgccctcgattatttcaaggatttctatccgcaacaattggtaaaagaataccatgtgacgccggctgaacttgaaatgccagcgcctgatttaatcatggcattgaccaaacgactaggttttaaagaagactacgatcgcttctgtatgaaattcatcacggacgcgcgtaagggtaagttagggcgctttacactcgatatcgttcctgtggaggcgcactaatgaccaaaccagaatcaattgctgccattaaggcacgcttattagacgacatttcagaggaagaagtggcgctcttacgcagtgatgcgcgtgctggcgtgcagaagttactcgttcaatatgacaagcggatggctaagttagcggcgcaaaaagcggcgtttatcgaacgacgccagctagaagaaagtttatggccagattatcccttgattgctggaattgatgaagttgggcgcggcccattagcgggtccagttgtgacagcggccgtcattttgccacatgattttgacctatggcaagtcaacgactctaaacagctttcgtttaaggtgaaacaagaactgtatcgcggtatcatggcacaagccatcagtgtcagcattgggattgccgatgcaccacggatcgaccaagagaatatctatcacgctacggaactggcgatgggcgaagctgtcgctagtttagcagaacaccccgattacctattggtggacgcaatgaccgtgccgacagacatcccacaagaaaaattgattaagggggatgcgcgcagtattagtatcgcctcagccagtattgtggctaaagtgattcgggatcaattgatgattaattatgatcaacagtatccgggttacgatcttgctaataatatgggttacgggacagcgaaacatctcgctggtttagctgaattcggtgttacgccaattcaccgccgcagtttttcgcccgttaaagacgccctatagaaaataaaacagctcctttacgaagataaacgtaaaggagctgtttttttgtgttgactaaaaagcaattattattgaaagtacacctggcagatgggtttggccccatcagtgaattacgcttagccgcatggttagtaacgagtcacaattgggctttatcggcattggagattgcgcagattgcgtgtttaccggagcgatattggctgacctttcagactagttttgacagtctagctctgcaacagaagtgtgccacgcatgaacgttatgttcagtatctgacgattctagaagcagattatccgcaacggttgttagaaacccattgtccgccaacagttttattttatcgcggcgatttaagtgttttgaaacagccatgtgttgcggtggttggtgcgcggcaagccacggagtatactaagcaagccctgcagcatttattgggattaccacaaacaacgacgattatcagtggtttagctcaaggggcggatgcgatggcgcatgaagttgcactccaaaaagggttacgaccgattggcgtgattggaacgggcttgaattgttattacccaccacaaaacgaacacttgcaacaggcggtcgctgaaaaagggttattgatatcagaatacggtttggacgtaacggctaagaagcaccacttcccagcccgaaatcggattattgccggactttgtcatagtttagtggtcacagaagcccgccaaaaaagtggtagcttaatcaccgctaatttagcattacaagccaatcgtaacgtatatgccttaccgggccaggttaatcattcattatcggcaggctgtaatcaactgattttagccggtgcaacgccgcttttaaatcaacaattgttattggacgagttgcattattttgattgagggttaattgttgacaattctgcggcatgttgttaatattaaagtcacaagttacttataaagtaacaaatggaattcaaaggggatttttaatatgaaatatgcaattacagcagtgacaggtcgttttgggcaagtcgcaatgaagacgttggctgacttagtgccagcagaacaaatcattggattagcacggaatactgaaaaagccactaaaatggtcccagctggtgtgaccgttcgtcccggtgactataacgatgttgccacattaacggaatcactcaaaggcgttgaccggttattattcatctcctcacaacctggtggcgatgtgccccgtgcgcaacaacatttaaccgtgattgaagctgctaaaaaggctggcgttaagtggattgcttatacgagtttcccacacgctgatcaagcaacaggtgctttagcaagtgatcacattcaaactgaaaaagcattggcagcatcaggcattgatcatacattcttacgcaataactggtatcttgaaaacgaaatggatagcattaaaggcgcattagcaggtcaaccatttgtttatggcgctggtgaagggcatgttggttgggcactcgaacacgactatgctgaagctgcggctaaggtattagtcaacgatcaaccaaaagcgatttatgaatttgccggtgcgccagccacttatgcggatttagctcaagcgattagcgagttgactaatcaagaatttaaggtagtatcattagatgcggctgattatcgtcaaagcctcgaagacaacggcttacctgctgaagtcgctgaaattgtcactggtattcaaacaatgattcaagatggtgatttagatgaaaccatttctgatttacccgatgtcttaggccgaccattaccttcattaaaagaagcgttacagacgattattaaataagcctgaattgatttcaaaaaggcggttgaaccatgaaatattctcataaacttagtgatgccatccatattttggcctatgtcgatatttttcaagatggtgatttatcaagccaagcgattgctgggagcatcgagtctaatcctagtttagtgcggcggctaatgtcactactggtgaaggcggatttattagcgactaaaccggggacgattgcccctaaattagcgcgcccagcggaacagattacaatgttagccgtttttcaggcgcttgatacagatcaacggttattacacgttgatgaaaaaacaaatccagattgtttaattggtagcaacattcaagcaacccttgatgcggcttatgatcaggtgcaaaaagctgcggaagcggagatggcaaccgtcacccttgatcaaattattgcggggattcttgaacgcgatgcacaaaaaaatagtttgtcagtctaagttttttatctggcgactatataatagaagaaatcggggttcgaccaagtggttgaaccccgatttttggtgtgatttgtacgtttgaaaacaatttctctttggcatactgccaaacctatgctatgctttaagctgttaatatcaagcatactatcagttgacaatcgtcaaggtagtgttttatgctaatgaacgatttgaacaaagcgttctgttgaaaggggtttgtccatggcaggcaaaaatttagtcattgtagaatcacctgcaaaggccaaaacaattgaaaagtaccttgggcgcaactataaggttgttgcaagcaagggtcacatccgcgatttaccaaagagtcaaatgggtgttgattttgaaaataattatgaacctaaatatatctcgattcgcggtaaaggcgaaacgattaaagaattaaaaaagcaagctaaaaaagttgatcatatctatctcgcagccgatccggatcgcgaaggcgaagcgattgcatggcatgtttcccatattttaaaactcgatccaactgaaaaaaaccgggttgtctttaacgaaattaccaaagacaccgttaaaagtgcttttaaaaatccacgtagtatcgatatgaaactcgttgatgcacaacaagcgcgacgcgtgcttgatcggattgtcgggtattcaatcagtccattactctggcaaaaggttaaaaaaggcttgagtgctggtcgggttcaatccgttgcgttaaaactcgtgattgatcgtgaaaacgagattaaagcctttgttccagaagaatactggtcattggatgcggaatttaaaaagagtcgcagtaagtttaacgccagtttctacggcgtgaagggtaagaaattaccccttagcgataatgatgcggttcaagcgattttgaaacaaatcgataagactaaggatttcacgattgaagatgttaagaaacgggaacgcaaacgttttgcagccgcaccatttacaacgagttccttgcaacaagaagccaaccgtaagttgaacttcagaacgcggaaaacaatgatgcaagcccaacaattgtatgaagggattaaccttggtggcaaagaaggcacggtcgggttaatcacttatatgcgtaccgattcaacccggatttctaccggtgctaaacatgaagcgtcacaattcatccatgacaattatggtgaagaatatgcggcattaaaggcgcataagacgaagaatcctgaaggtgcacaagatgcccatgaagcgattcgcccaacgtcagtgatgcggacacctaagagcttgaaagacgttttaactaacgatcaatataaaatctataacttaatctggtcacggtttgtcgccagtcagatgacaccagccatttttgatacggtcgcagttaagattgctcaaggtgatgtcttattcaaggcaaacggctcacaaatgaagttcccaggattcacgaaactctatgtgtcatcacgtgatactgaagactctgctaaggataatgtcttaccagaacttgcagttggggatgcggtgaaactcgttagaactgatccagtgcaacattttacgcagccaccagcacgttattctgaagccaatttagttaaggctttggaagaaaacggtgttggtcgaccatcaacgtattcaccaacgatcgaaacgattcaacggcgttattacgtgaagttaaacgcaaaacgctttgaaccaactgagttaggggaaatcgtcaatggtttaattgtcgaattcttcccggacatcgttaacatcgactttacggccgatttggaacatcgtttggatgaagtcgaaacgggtaaagaagactgggtcaaggtgattgacaacttcttcaaaccgtttgaaaaagaagtcgaaaaagcgagtgaacaaatcgaaaaagtacaaattaaagatgaaccagctggctttgactgcgacatctgtggtgccccaatggttgttaaaatgggtcgttatggtaaattcttcgcttgcagtcgcttcccagattgtcgcaataccaaggcaatcgtgaaggaaatcggcgtcacctgtcccaaatgtggtaaggggcaagtcatcgaacgtaaatcgaagaagaatcgcttattctacggttgtgatcgttacccagattgtgattttatcacatgggataaacccgtcggcagaaactgtccgaagtgtgaacactaccttgttgaaaagaaaattaaaggtggcaaacaagtaatttgtccaaacggtgactacgaagaaaccgtccaaaaataattagaaaaatggagactagcaaatgagcacagaaccttttgtaaacgtgattggtgccggattagccggttcagaagcagcatggcaaattgcccaacgcggtgtgaatgtgcacctctatgaaatgcgtcccgttaaaatgacaccggcgcaccatacagaacaattcgcagaattagtgtgtacgaattcgctccgtgcgaaccaaattaccaatgcggttggcttaattaaagaagaaatgcgtcacttggactcattaatcatcagtgcggctgatcaaaatgccgttcctgctggtggcgcattggccgttgaccgcacaccgttttcacaaacggtgacggatcgcttagccaatcatgaacgtgtcacagttcatcatgaagaattaaccgattttccagaaggtcctacgattgtggccactggtccattaacgtccgaaggcttagctgaaaaaatcagtgccttaaacggcagtgatggcttgtatttctacgatgctgcagcgcccattttggataagaacagtatcgatttcgataaagtttacctcaaatcacggtatgataagggcgaagctgcttacttaaactgtccaatgactgaagaagaattcgaaaacttctacaaagccttgattagcgctgaagttgcagaaatgcatgactttgaagaagaaaagttctttgatggctgtatgccaatcgaagtgatggccaaacgcgggattaagacgatgttattcgggcctttgaaacccgttggattggaagatccgaatactggcaaacaaccatacgccgttgtgcaattgcgccaagacaatgcggctgctagtttgtacaacattgttggtttccaaacacatttgaagtggggcgaacaaaaacgggttttccgcatgattcctggtttggaaaatgctgaatttgtgcggtatggtgtgatgcatcgcaatactttcatgaaatcaccagatgttttattaccaacctatcaatcaaaacaacgtgacgatctattcttcgctggtcaaatgactggggttgaaggctacgttgaaagtgccgcttctggactagtggctgggattaacgccgctaaactggcgttggaccaaacaccggctgttttcccaacggatacggcgatgggatcaatggcgcactatattacccatacgagtgccaaacatttccaaccgatgaatgcgaactttgggattttcgaacctttgaaacaacggattcgcgataaaaaggaacggaaccaagcacttgctgatcgcgcacttgaaagtatcgaccaatttaagacgacactttaattagaatcttttaaatcccgccaggcttgtggtaaagtaatactaatcaagcttggagggatttttttggcgttagaacaagaatggcttaatctttttttacagtacttagtggtcgatcggcattactcgccagaaacccaaaaagcttatcaagctgatattcagatgttcagtgcttttttaaccgctaacggcggcttagcgtcgtttaaacaggtcacgccactggacgtgcagacttacttgaatgaaatggatcaaaaagaatatagtcgtgaaactgtcgcgcggcgaatttcgagtttgcggtcgttttaccggtatttagtgaaaaatgagttcgtgcaaaccgatccttttgaagctgttcaattaaaaaagcaacagcataagctgccgcggtttttttacgaaaaggaaatggacgcgctatttgctgccattgatggggatcaaccactcgatcaacggaatcgcgccatcttagaattactgtatgcgacggggatgcgggtgagtgagtgcgcgcagttgacggtagcacaaattgatttcggcttacgcgtcattcttgttcatggaaagggcaataaagatcgctatgtaccattcgggcaccatgctgaacgtgccttgcaagcttatttaaaagttggtcgtgttcaattgatggccaaaaaacaattggaccacgatgtcgtttttgttaatcatctcggagcgccaattacaagtcggggaattgaatacattttagatcagattatcaagaaaacaagtttaacgagtgacattcatccgcatatgattcggcatacctttgcaactcacttattggatcacggtgctgatctgcgaacggtgcaggaattattaggccacagtagtttatcaaccacacagatttacacccatgtcaccacagcccatttacaaaaagattaccgccaattctttccccgcgcgtaaaactcggactaaagtttgatttttttcaacgaaaaatagactaatattagcacacagtcttaaagactgctaaaatagaagtgcgttcaaaccggttatgttctgagaattagcctaacaaggcgaatgattactggaagcaattgtttgacttgtgtagctaaacgcaagaacatggtttgaaaagcacgttaagaaagaagtgcgtcatcaacgggttgtttttgagcatttgcctaatcaggcggattaccggcaacgccggtgatatgacagatgtagcaaagcgtagaaagcagttgatgaaagcacgttaagaaaaaagtaagtgcgttcaagcttgttcaacttttgagcactagcacagggaagcgaattagcgataaagtcgctgatttgattcacagcgctaagcgcagaaagttagtttgaaaagcacgttaagccccgcccaatccccaaacaacgttaggagtaattcatatgacaacaatttgtgcagttaaacataatggtaaaacagctatcgccggtgacggtcaagtcaccatgggcgaaaaatttgtgacgaaggattctgctaaaaaggtccgtcgaatttatggtaatcaagtcgcaatcggctttgctggtggtgttgcagatgcctttacgctacaagaatggtttgaacaaaaattagaaaagtattcaggcgacctgcaacatgctgctgttgctttagcgcaagactggcgtaaagatccaacgcttcaaaaattagaagcgatgttgattgcggtcaatgcaactgatattttattaatttcagggaatggtgaagtcatcacccctgatacgctatcggaatcaggtgatcaagtgattgccgtgggttcaggcggcaatttcgcccaagcagcagctaccgcattattacttgaaggaaaagatgacttatccgttgaaaaaatcgtcacaaccagtgttgatattgctggtggaatcgatgtttacaccaaccacaacgtgattgtcgaatcattttaggaggtcgcacaatggacttaatgaataaaacacccaaaacaatcgttgccgaacttgatcaatttgtcattggccaagatcaagctaaaaaagccgttgcggttgcactatacaaccgttatcgccggatgcaactcagtgcaaaaatgcaacaagaaatcacgcctaaaaatctattaatgatcgggccaactggggtcgggaaaacagaaattgcccgacggttagcgaaagttgtcgatgccccatttatcaaggttgaagccactaaatttaccgaagtggggtatgtgggacgtgacgttgaatcaatggtccgcgacttagctgatgtggctgtgcatatggaagaaacagaacaatttaaaaacgttcgtgctaaggctgctcgtcaagcagacaagcgcttggttaaactactagtaccgggcattaaaaaggaacaacgtaagaacaataacaacatgaatgatttaatgaacatgtttaacgcgcttcaaaaaggggaaacaccagctggtttcggacaaactgaatcagaagaagtgacggatgatatccgtaacgaacggttatctgttaaagaacagttagataaaggcttgttagatgaccgggaaatcgaaattcaagttgatgaaccgaaaaaagttgccccaatgaacgatatgatgggccagatgggaattgatttaaacgatactctgggttcaattatgccgaagaaaaaaattacgcggacggtaacggttaaagaagcgcgtgaagttttcattcaagaagaatccgctaaattagtcaaccatgccgatatttaccatgatgcgctccaacgtgctgaaaataccgggattatttttatcgatgaaattgataaaattacggctggtggcaaaaaacaatctggtgaagtctctcgtgaaggggttcaacgtgatattttaccaatcgttgaaggctcacaagtcaatacgaaatacggtgttttgaagaccgaccatatcttatttatcggttcaggggcgtttgctgaatcaaaacccagcgatttaatcgctgaattacaaggacggttcccaatccgggttgaacttgaagatttaactgaaaaagacttcatccgaattttaacggaaccaaacaacgcacttgtaaaacaatacatggcgttgattggcgccgatggggtgcacgtcaccttcacgatggaagcaattggccgcattgctgcgattgccttccaagttaaccatgataccgataatattggtgcgcgtcgtttggccaccatcttagagaagctattagaggatattctctttgaaggtcctgacatgcagatgggggatatcaccatcacagaacaatatgtcaacgataagatcggtaatattgcagccgataaagatttaacccgctttattctataatttttaaaaggtggtattttaagatgatccaaattgcaaacgaatttttaacggtgaccctcagtccaaaaggcgccgaattacaaagtattaagggcgccgtttcggggcttgaatatttatggcaagctgatcccgatgtttggggccggcacgcacccgttttattcccattcgtggggcgttcaaaagcagaccaatatacgtataatggccaaacctatccgatgggtcaacacggttttgcacgtgatcgcgaattcagtatcgaagaacaatcggaccacgccgtgactttcttgttgaaagcagacgctgacagccgggccgtgtatccatttgaatttgaattacgtgtgagctatcgtgttcatgatatgcatttgacggttggctatgacgtccgcaatgttgcgccaagcgggccaatgtacttctcaattgggggtcatccaggatttaaagtcccattaacggatgacacgcaatttgaagattatttcttagactaccgcccacaaaaatcacgggttaagatcccattgcaaggggccttcattaatttgaacgaccggacgttagcaccaaccgacgtcgcaacggatatcaatcaccaattatttaaaaatgacgccttaatctacgaattaaagggtcaagccaatgaattcagtattcgttctgaaaaaacggaccactcagtgaccatgaaattggctggcgccccattcattggtgtttggtcaccttatccaacagaaggcaaccttgtgtgccttgaaccttggtgggggattgcggataccgttgacgcaagcggtgaactttcagaaaaatttggtgtcaacgaactggctgcaggtgaaacgtttaatgcaagttatgaaattactgttcgttaatgaatgattaaaaaaacgcacttaccaagatggtgagtgcgtttttttagtaaactggctgtaggcgggtaacgcattctaaacgcactctgctagtttttccagtagttccatgctaagatataagttataaaatcataggttaggtagggtaagtcatgactgaagaaaagaagtattacggcgcggatgccatcatcgatagtttagtaaatcatgatgttgagtacgtgttcgggattccgggtgcgaagattgatcgggtttttgaacgactagaacatcccgttaatccaaagacgcccaaattaattttgacgcgccatgaacaaaatgcagccttcatggcggctgggattggtcggattacgggcaaaccaggcgttgtaatggcgacttcaggccctggtgccagtaatttagcgacgggggtcgtgacagcaacggcagaaggtgatccagtcttagccattgccggtcaagtgaaacgcgctgatttgttgcgactaacgcatcaaagcatgcgtaatgccgctttattcgcaccaatcacaaaattcagtgcggaagtccaagaacctgagaatttatcagaagtgattgctaacgcctatcaagaagctgaatccgctaaacagggcgcaacgtttgtcagcatcccacaagatgtcacggactcagaagttcattctaaagtgattaaaccgctaatggcgcctaaattagggccagccagtcccgttgaaacgacgcttttggcacaacggattaaagaagcaaaattaccagtacttttagttggtatgcgcgcttcttcaccagaagtgacagcagcgattcgcaatttagtggctgaaacccacattccggtcgttgaaacgttccaagcagccggtgtcatttcgcgtgatttagagactgatttttatgggcgagttggtttattccggaatcaaccaggcgaccgcattctaaaacgcagtgatcttgttattgcagtcggctatgatccaatcgaatatgaaccgcgtaactggaacgctgaaagtgatgcgcacattatggtgattgatgatatgcgcactgaaatcgatcataatttccaacctgaaaaagaattggtcggcgatattgcgcagaccctagactttttattaccttatatgaaggggtatcaactagcgggcgatgtgcgtgattatttagttgaattgcacgcagaactcaatcaacgtgacacggcacctgaaatgacgaccgataatccacttagtcatccgttgaacattatttcagaactgcaagcacgggtcaccgacgaaatgaccgtcacggtcgatgttggtagtcattacatctggatggcgcggcattttagaagttacgaaccacggcacttgctctttagtaacgggatgcagaccttaggtgtggcattgccatgggcgatcagtgctgctctagtgcggccaaatacacaaattgtgtcggtttcgggagatggtggcttcttattctcaggtcaagacttagaaactgcggtgcgtctgaacttaaacatcgtgcatattatttggaatgacggttattatgacatggtaaaattccaagaagaaatgaaatatggcgaatcagcggccgttaagtttggtcccgttgattttgtccaatatgcagagagttttggtgcaaccgggttacgggtcgaaaaagccgcagatcttggtaaagtattggatcaagcctttgccattgatggtcccgtccttgtagatgtgcccgttgattacaaagataatcaattattaggccaagcattattacctgaccaactcgtttaatttgaggaggaaaatcaatgacaaatgatgtcaaacgcgtttatcaacacggaacgttagccctattaattccggggctctttacagggacaatgaccgttgctgaattattaacccatgggaattttggaatcgggacggcgcacggtttagctggcgaactggtcttattagatggccatgcttatactgtgaatggggatggccaagtgactgaactcgcacctgatgcgacagttccatttgcgacagtgcattggcaagattcatcattacctacacaagcggttcatcaacgcacaaaggctgagttagaaacgcaaattctagcgcaagcaccgttaaaaaacttgttttttgcggttaaaatgactgggactttcaaagtcatgcatacgcgggccgtccaaacacaacaggaaccttatccgaatttgactgctgcaacccgagtgcaaccggagtttgaacaaacagacgtaacgggcacgttgattgggtattatgcaccagcgctttatcaaggcgcagctgttgcaggctatcacgtacacttcttaaacgatacgcacgactttggcggtcatattctagactataccgtggtcgatgctcaaatgacgctccaaccgtttgaaacgtttgaacagcacttcccaagtgataacgaagcttttttaaagagtgactttgacttacaacaagtcaatgccgatattgaagaagcagaacactaaacattcaaaaagcccacggaaaaatccgtgggcttttttgtattttaagcatggtggttaattggaccgtacttgtggccgacttcaatcgggttagcgatggcgcggtgaacaaattgtttagcggtcttaatggcagcctcaattgtctgtcccttagcgatttcagcacagatgcaagctgaaagtgaatcgcccgtcccattaatatgggtggtttcaacgtaaggttctgatagccaaaattcttgtccatcggcaaggcaaacgtagtctgtaacgattgattgtccggcctcgtgatggcctttaatcatgacgttttttgcgtccattgccaatagtgcttggccagcagcttggaaatcagcaggtgtcttcagttcaataccagttaatttttgcgcttcgtagaaattaggcgttaggacagttgcaaggggcattaattctgtctttagtgtgttaaaagcatcatctgccaacaacaatgcttcatgcttggtaataatgaccggatctaacactaggggaccaaagtcatgttttttcaactgattagcaacggttagaatggtctcacggtcggttaacattcctgttttgcaagcgcgaacctgaaagtcggctgcaattgcttcaaactcggcatcaataaagtcgggagacagtgcttggctagcacgaatcccatatgaatttccagcaacacaggctgtcaaaatgctcataccataaacattacgggcaaaaaaagtatttaaatctgcttgtgcaccggcactgccatcagaatcggaaccggcaattgtcatgacttgcggaaagctatttaacattatcaacatctcttttccagagcggacggaacgtccatcacttaatatatcctaatattagtataagcttttaggtgtccttttttcaatcagcagaagacactaattaagtgaatttcgtgtatactatgaattaaataattgtcaggagggacttatgattcaattaaaaatcgaacgattatcttatcaggttgatcaacaagtgattttaaccgacattaatttaaccgttgaaaaaggcagttacttaacgattacaggaccttctgggggtggtaagagtaccttgttacggttaattgcggacttactaacgccgacaagtggcaccattttattaaatgatcagccactgacccagtttagtcccaatcagtatcgacaaaaggtttcgtattgttttcaacaagcaacgttatttggtgaaacaatcggggataatttacgttttccatacgagattcgtaatttaccggtcgatatggcaacaattgaaaaagcgttggcagcggttgggttagccaacatgccactaacgaaaaaaattaccacgttatcgggcggtgaaaagcaacgaattgccttgattcgtaatgttttatttccaccggaagttttattacttgatgaaattacgactggtttagatgccgctaataaggcaattgtattggcgtttgtccagcacctcaatgaggattgcgggctcacaattattgccattacccacgatacagaagaattacaacggaaagggcgccaggtgcaaattgttgctggcgaattggtaaatcaagatgaacttagccgttaatggtctttcactgacgtttgctgtgacattagtgtttgtcgcattagtcattagcttccatgaaaaaatcggtcttgaaaaagatatgattatcagtgtttttcgcgcaatcattcaattatttatcgttggttatttactgaaattcatttttcatattaacgatgtgtggctaacgttattgatgatgctgatcattatttttaacgccgcagcaaatgccaaaaagcgggcggggaaactacgcaacgggtttccaatttcatttatcgcaattttaacaagtactggggtcacgttaggattacttgttttatctggggcgattaagtttattccatcgcaaattattccaattactgggatgattgcttccaactcgatggtcgccattggcttgagttaccgcagcttactggcgcaatttaaggatgaacggcaacctgttttggaacgactcgccttgggagcgaccgctaaacaagcatcaattgccattattcgtgagagtattcgtacggggatgtcacccacgatcgattccgctaaaacgatggggcttgtcagcctgccagggatgatgtcgggcctgatttttgccggaattgatccagtcaaggccattatgtaccagatattagtgacctttatgttattatcggcaacgagtcttggttcagtgattgcgtgttacttagcttatcgatcattttacaatgaacgggaacaattgattgatctttaactgattgcacaaaaaaacgcccgttcggcgtttttttagttattgatgtttttgtttatagcgatagtacaggccaaatggcactaagttttcagtgccatttttaatgcgttgtagattttcgcggtgccggtagaccaggaaaagtaagaccaaggtcgcaatcgaaccgagtagccaatcatgcgtgtaaaacgataaaatcgcaatcatcaatggaccgaggatgctagccatgctaaccatacttgtaatcaggatgacactgataaagatggtactggcaattacgaagaaaagtggattgtatgccagtaagatgcctgcgctggttgcaacggcttttccccccgtaaagtgtaaaaagatggagtaagcatgaccgacaacggccgctaagccgacgattaagaccaatgcatgattggggatgtgaaaaatcatcggtaggctagcagcaagtgtgccttttaaaatatcaagaaataaaacggctgtcccagcgattgggccgagcacgcgatacgagttagttgtgccgatattatggcttccagcatctcggggatctttgtgacagaaaacgcggccgataataacgcctgatgggaacgaaccgatcaggtacgcaagaataaagataagactaagtttcatgacaaaaactcctatttgtggcatttgtttcccctattttagcattttgacaagggaaaaggaatattgtatgttagaataggtgaatacgaacatacatttgtattggcaagaaattttaaatttttgattgtaaaatcatccaaacttgttgataatataccttatctgttcatttttaaacaaaggagtcatacttgaatgccaaatcaaaaacaagattataatgataattcgattcaggtcttagaaggtctagaagcagttcgaaaacggcctggcatgtacattggctcaactgacggtcgcggcttgcaccatttggtgtacgaaattgtcgataacgctgtcgatgaagccttggctggttttggttcagaaatcaacgtcgtaattggcgcggataatagtattagtgtccgtgatcatggtcgtgggatgccgactgggatgcaccaatctgggattcctacgattgaagttattttgacagtgcttcacgcaggtgggaaatttacccaaaacagttataaaacatccggcggtttgcatggggttggcgcgagtgtcgtcaatgccttatccgaatggttgaccgtccgcgttgtgcgtgatggtgttgcctacgaagaacgctttgaaaatgggggccacccggttggtaccttgaaaaaagttggcaaagctaaagaaccaaacggcacgttaattacgtttaagccagatgggacaatttttcaaacgactacttataactacaataccttagcagaacgattacgcgaatctgcctttttactcaaagatgtcaagattacgttgaccgatttacgcgctgagccagcacgtcaagatgtcttccattacccagaagggattcaatcatttgtcgattatttgaacgaagataaagatacgattggtaataagttatatttcgaaggcaccaaagaagacattgaagtcgaatttgcgggtcaatataacgatggctactccgaaaacatcatgtcatttgtgaataatgtccggacaggtgatggtgggacccatgaagctgggatgaaagccggcttaaccaaagcttttaacgattacgcccgcaaggtaaacttgctcaaagaacgggataaaaacatggaaggctccgacgtacgtgaaggtcttagtgccgtcttgtctgtccggattccagaagaactcttgcaatttgaagggcaaaccaagggtaagctaggctcgccacaagcgcggacagctgtcgatagtttggtttatgaacaaatgagctttttcttacttgaaaatggtgaatttgcgcaagccttagtgcgtaaatcattaaaagcacgcgaagcacgtgaagctgcgcgtaaagcacgtgaacaaagtcgaaatggtaagaaaaagaagaaatccgatggcttattatctgggaagctaacaccagcgcaatcgaaaaatgcggcgaagaatgaattgtacttggtcgaaggggattctgctgggggttctgctaagcaagggcgcgatcggaaattccaagcgattttgccattgcggggcaaagttttaaatacccaaaaagcgaaattacaagaaattctaaaaaatgaagaaatcaacacgatgatttacacgattggggccggagtcggggctgaattcaaacttgaagacagcaattacgataaagtcatcatcatgaccgatgcggataccgatggggcccatattcaaattttgttgttaaccttcttctaccgctatatgcggccgttaattgaagccggaaaagtctacattgccttgccaccattgtataagctccaaaaaggtgctggggcaaaaacgaagattgcctatgcttggactgatgatgaattgaaagtcgtcgctaaagaaatgggtaaaggctacagtcaacaacgtttcaaagggttgggtgaaatgaatgctgatcaactttgggataccacaatggatccaacgagtcggacgttaattcgggtgcggattgatgatgcagccttagctgaacgccgcgtcacaacgttgatgggcgataaagttgaaccacgtcggaagtggattgaagaaaacgttaagttcacaatggctgaagatggtagcatcttagatacaacgaatggtcaaccagcaccgacaacttcaagcgctgaagtggatttatttgaccaattagacgaatagaaaagtgagtgattaaatttggctgatgaagcacaaaaaattcaagagctaacgcttgaagaagtcatgggcgaccgctttggccgctattcaaaatacatcattcaagagcgggcgttaccagatattcgcgatgggttaaaacccgttcaacggcgaattttatacgcaatgtccatcgatgggaatacttatgataaagggttccggaagtcagcgaagtctgtcgggaatgtcatggggaatttccatccgcatggggatagttcaatttatgaagcgatggtccggttaagtcaggactggaaattacgtgaaccactgattgaaatgcatgggaataatgggtcaatggatggggatccaccagcagcaatgcggtatactgaggcacgcttaagtaagattgctggtgaaatgctcaaggacatcgataaaaagacggttgatttcgttttaaacttcgatgataccgctgaagaacccactgttttaccagctcggttcccaaacctcttagtgaatggggcaactgggatttcagctgggtacgcgactgaaattccgccacataatttaggtgaagtgactgatggcttggtctatctattggatcatcccgatgcaacgttagaaaaaatgatgaccttcatcaaaggacctgatttcccaactggtgggatcttacaaggggtcgatgggattaagaaagcctatgaaactggtcgcggtcgagttgtcgtccgggcaaaaaccagcatccaacaattacgcggcaatcgggaacaaatcgtgattagcgaaattccttatgaagtcaacaaggctatgatggtcaagaagattgatgaattacgcgttttaaagaaggtcgatgggattgctgaagtacgagatgaaagtgatcggatgggcttatcagtcgttgttgaattgaaaaagcaagcggatagtcaagggatcttgaattatctgttcaaaaatacggatctgcaaatcacatataactttaatatggtcgccatctcgcatatgcaacctaaacaggttggcttattagaaatcctccatgcctacttggaacatcaagaagaagtcgtgattcggcggacaaaatataccttacaaaaggcattggatcgtcagcacattgtcgcagggctaatcaaggcgctctcgattttagatcaagtgattgcgacgattcgtggtagcaagaataaaaaagacgctaaagataatttagtggcaagctacgccttcacagaagcccaagctgaagcgattgtttcactgcaattataccggttaacgaataccgatgtgactgctttggaacaagaatcagctgaacttgatgcagcgattaaggaataccggatgattcttggtgatccaaaagcacttgcacgggtgattaaggcgcagttaaaagcaatggtcaaaacttatcggagtgaccgaaaaactgaaattgaagcacaaattgagacgcttgaaattgatacaagtgtgactgttgttgacgaaaccgtcatggttgcagttagccatgacggctacttgaaacgtagtagtttgcgctcgtatcaagcatctgaaggggccgacagcggtttgaaagacggcgattttgccattttacaaaagccactacaaaccttagatcaattgatgatgttcaccaattacggacatttaattcaacgaccagttcatgaaattgctgatttgaaatggaaggaaatgggcgaacatatttcgcaatcgattggtttggcggctgatgaagcggttattgcagcatttgcctttaagccaaatgaacaggctggctattttgtgattgggacggatgatggctatattaaacaaactgccttctctgacctcttgccaagtcgaacatatcgttctaaggcacaagactttattaagttgcatgcagatgctcatgtgacaaacgtgaactggattccaagtgatgaagggctagccgtctttagtgctagctataaaggttatggattgagttttaccttatctgaagtctctgtatcaggtgctaaggccagtggggtcaaattaatggatctcaaagatggggatgttgtcaccggctttacgttatatcatccagaagataaacatgcagccgttgccattgtgacgcaacggggcgcctttaaacggatgctcttaagtgaggttggtttaacaagtcgtgcgcgtcgtggggtcttaattctccgtgaattgaagaaagaaccacatcgggtagcagcaatggttagtgttgagcaggcaagcgagttactgattcatactgatcagcaagaagtgattgcaattaacccttatcaacatgcaactgccgaccgttattcgaacggtagttttgtgatggatgttgatgaagttggacaaccggcatttgttcaaacgactattccagttaaaaatgaagacgagtcaaaataataaaaaagcaagtcatctatgtgatgacttgcttttttctgttatacataatatgcggattttttggttttgtactataacagcaaaataagttttgcacaatttaaatggtggggttataaaaatattttaagtagataaatagctataaatcaatctttcaaaagagtttaagagtttctaaacaatcaaaaagaaagggcttgcataaactatgtgatgtgttatactaaaattgtgaaaactgtgataaacaacacttgactaatggaggtaatccacatggtaaaaaccgaaaaaattaacttagccgactattgggacggctttaacaaaggtgactggcaagatgaaattgatattcgtgatttcatccaacaaaactttactgcctatgacggtgatgaaagtttcttagctggtccaaccgaagcaacaacaacgttaaatgatcaactaatggaattgaagaaacaagaacgtgaagcaggtggcgttttagccgcagacaatgataatcctgcaacagttacgtcacacggccctggttatttaaacaaggatcttgaaaagattgttggattacaaactgatgccccattaaaacgcgcattcatgccatttggtgggattcggatggccgaagatgccttggaagcatacggctttaagactgatccagaacaacacaagatttttaacgaataccgcaagacacataatcaaggtgtttttgatgcttatacaccagacatgcgtaaagcacgtcactacaagattattacgggccttccagatgcctatgcacgtggtcggattattcctgacttaccacggattgcagtctatgggattgatcgtttagctgaagaaaaagtccgtgactttaatggtgttggcgacggtgaaatgacagacgatgtcattcgtcttcgtgaagaaatcaatgaacaatatcgtgctttacaagatatgaagaaaatggctgctagctatggctttgatatttcaagacctgctaagaatgcccaagaagcaattcaatggatttacttcggttacttagccgctattaagacacaaaacggggctgcgatgtcagttggccggattgatacaacgatggatatctttatccaacgtgatttagagcggggcttaattacagaagctgaagcgcaagaaatggttgaccattttgtcatgaagttacggatggttcgtttcattcggacagaagattataattcattattctcaggtgatccaatctgggcaacattatcaatgtgtgggattggtatggatggtcgtcatcatgtcactaagactgccttccgtgtcttgaagacattggaaaatatgggtgctgctccagaacctaatatcaccttactttggtcagatcgcttaccagaaggtttcaagcgctatgcaacagaagtttcaattaagagttcaacgattcaatacgaaaacgatgatttgatgcgtaatgaatgggggagtgactattatgggattgcatgctgtgtttctgcacaaccaattgcagacggcgttcaatattttggtgcgcgtgctaacttggctaagacaatcctttacgcaattaacggcgggatcgatgaattaggcaaagctcaagtcggcccagcttatcaaccaattacaagtgaaatcattgattacaaagaattcatgggtaaatacgataagatgttagattggttagcagacgtttacgttaatgctttaaacaccatccactacatgcatgataagtattactatgaatcagcacaattggcattgaagaatagtcgtttagaccggacatttgcgactggtatttctggtctatcacatgcggttgattcaatctcagcgattaaatacggccaagttaaagttatccgtgatgaagacggtatggcagtcgatttcgaagcgcaaaatccagactatccacgttatgggaacaatgacgaccgcgctgacgatatcgctaaatggttagtgaagactttctatacgaagatgaatacgcatcatttatatcgtggctcaaaattatcaacatctgttttaacaatcacatcaaatgttgtgtatggtaagaatactgggacaacaccaaatggtcgtcaagctggcgaaccattctcaccaggtgctaacccagcatacggtgctgaaaagaacggtgctttagcatcattactttcaactgcgaagattccataccgttatgcaactgatgggatttcaaatacgtttggtgtcacaccaaatacattagggcatgatgatgaagcacgtaaagacgcgcttgtgaacatggtcgatggttacatgattaatcaagggatgcatttaaatatcaacgtcttcaataagcaaaccttaatggatgcacaacaacatccagaagaatacccaacattaacggttcgggtttcaggttattgtgtctacttcgctgatttaacgaaggaacaacaagacgacgttatctcaagaacgttctttgacgaaatgtaatctaacgaaagtggatagcaatatccgctttctggtaaggtcgttaacgcgaattaacgactttaccagaaagcatagcttttcttttaagaggtgaaagtgaaatggcaattaaatttacaacacggttatcaactgaaaatgttgttccagaaaccccgataacaccagaggtgccaattggatatgttcattcgattgaaacatttggttcagtggatggtcccggaattcggtttgtcgcctttctacaaggctgtcgcatgcgttgcgaattctgtcataatccagatacgtggaatattggtagcggagaagcttataccgcagacgaattaatcgcaaaggcactgccatataaggccttctggggtaaagatggcggaattacctgtagcggtggtgaatccttaattcaaattgattttttaattgatttatttaaaaagtgtaaggtacaagggattaatacctgtttggatacttgtgggcagccgtttacgtataaagaacccttctttagtaaattcaaagaattgatgaaatataccgatctttcaatggtcgatattaagcatattgatccagcggggcacaaaaagttaaccggcttttctaacgaacatattttagaaatgattgaatatatgtcaaatcatggtcatcatatgtggattcggcacgtcttgattccagaacggacggattacgatgagtatctcactcgtctaggggattatattcaaacgttaaacaatgttgaccgagtcgaagtgttgccctaccatacgatgggaatcgtgaaatacgaaaagatggggattaaatatccgttagcggggattgaaccaccgacccacgatcgcgttgtcaatgcggagcgtctattgcatacagcagactatccaaagcagcaacgctaacataagaaaattttaagcctttaataagaatgagcaacgaaaggggttgctctttttttatatctttattattataatgataggcgtaaactaaagaacggagatttgaaaatgaaaacaagacaagaaaatatcttctcctctaaaacattaacctatttcctacagttagcggaaacgatgaattatacccaagcggcacaactactcggtatcacgcaacctgctttaacccaacagattaaaaaattagaacggatagtcggggcgcctttattttattcagtcggcaagaagttacatatttcggatgctggtcggacgatgttggatgctacccatcagattcatgatttattaaatactgcgacggatgaaattcaaagttcaacgagtgcgacgcgcggtaagattaatattgggattttagcatcgatggaaatcagtgttatccaatccttcttaattcaatactataaacaatttcctgacatcgaagtcagcatgcacttattgactcggaaagaaatctgggaccgacttgaaaataataaaattgatattgccattatgtatttgccagatgacagcattaagaactggaaaccttataagtcacataagattgtggatgaacgcttactctttatcagccaagatcctgctttaaagacgcgtaagaagatccgttttaaagatacattagataataaatgggtgacatacccagatgaatactatttaaatcaattcatcagtgaagcctataagaatcaattggttgatcgtccagtgagtgcggctcaattcacatcaccatttgaaatcatgcgttttgctgaagcaactgaattaagtacagctttaccaaagagtttttatgaagcacataatttgggacttaagggaaacgcggttcaatttgatccggccattcagttcgaattagcttttgtcttccgcaaggaaaaggaagatattccacggattaatagctttttccgtgaattcgaccattatttagaagaaaaagattatttaacacggattagagagcaaaaccgtagaatcgtctaatatttttggtataattaggatgttatttttttaaaaggaaggtctgtataaatatgagtaaagaattagtattcggtcaccaaaacccagatacagacgcaattgttgcggcaatggcgtttgcttatcttcaacaacaactaggaaacgacgtagaagccgttgcgctaggtgaacctaatgaagaaacaagctatgcattgcgtcattttgcagcagcaacccctcgcatcattaaagaagcaagcagtgaagttgacagtgtgatgttggttgatcataacgaaagccaacaaagtgttgccgatatcaaagatttaacagtgacgcacgttgttgatcatcatcgaattgcaaacttcgaaacagtcagcccattattctaccgcgctgaaccagttggctgtaccagcacaattttattatcaatgttcaacgaaaacaaagttgaaattccagctcaattagctggtttaatgatgagtgctatcatttcagatacgttgttgatgaaatcacctacaacaactgaaaaagatcggattgcgattaagacattggctgaaattgctgatattgatttcgaatcatatggtcttgaaatgttaaaagcgggcactaacttagatgataagagcgaagctgaattaattgaagcggatgctaaaacattcgatatggctggtaaaaaagtgcgtatcgatcaagtgaatacagttgatatcgaagcggtcttcaaacgccaagctgcttttgaagctgctatcgaagcagacaacaaagctaatggttacgacttattcgtacttttgattactgacatcttaaacagtaactcagaagcgcttgttatcggtgaaccagcagaagcctttgaaaaagctttcaacgtaaaattgaacaaccatcgtgcacaattagccggtgttgtttcacgtaagaaacaagtggttccacaattaacagaagcattttaataacgattaataataaagtccttcggggctttatttttttattaggaggataggtaaatgaccgaggaaagcattgatgcaattcaagtgattgaagcgaccattcgaaattgccaaaagagtcagctgaagtttgtagcgggttcggctcaatttactttattaaaaaataggctttacgcattagaagttggtcgtgatttattgaacgggcacacagacataacagtcgaagccttagtcgaggcacaagccccgattgaatcgattattcataaaactgaaaaagcactctctaatcaaaaaaaacatcacccgtgataaaacgaatgactctattattagcagcgatgactgccgtgcagactgctattataaaccaactatctgcaaaaaagccccctcattaatttggggggctttttttgtgtgccatcagattggaattattctaatctaactaaaaatgtgttataatgtaaatgaattcacaagaaggagcgattgacgatgaaacataccatcaagtttgccttaacaattagtgtgggtgtgattgcgctatgcttggcgtttttgctacatgagccattgtgggcacagattttagtgagtttagcggggagcttagtagcgctctcgatgtttattgagatgattaaaacgctaaaatctggtcaatacggggtggatctattagcgattaccgctattattgcgacgttagcggtcggtgaatattgggcagcactaatggtcttggtcatgttaactggtggcgactcattggaagactatgcagcgcataaagcaggccgtgagttaaagacattacttgataattctccgcaaacagcgcatcgccttgttaatgatgcggtcgaagatgtttcagtcgataagcttcaagttggtgatcaagtgattattaaacctggcgaattggtccctgttgatgggcatattattgcaggaagtgctttattcgatgaatcatcgttaacgggtgaatcacgccccgttgaaaaagcactaaataatgagctcatgtcaggctctgtgaacggcgatacgtcggttaccatgcaagttgaccaattagccgttaatagccaatatcaagcaattgtacggcttgtagagacctctgcggcacaaccagcgcattttgtgcgcttagctgatcgatatgccgtgccatttacattagttgcgtatgtgattgctggagtagcttggtggttatctaaggatccagtacggtttgcagaagtgcttgtcgtggcttcgccgtgcccattaatattggcagcgcctatcgcgttaatctcagggatgagtcgtgctagtcgaaacgggattattgtcaaggctggcacaacaattgaaaaattagcgtctgctaaatcagcagcgtttgataaaactggaacaattacgaatggtcaattgacggttgaccaagttgtgccagtgattggtatcgcaccaaccgatttattgcaattggcggctagtgcggagcaagaatcttcgcatattttagcacggtcacttgttaaagcggcacaggtagaacaattacaaccaattgaaacattaaaagaagcaacgggcgctggggtagttgcgacgctgtcgtctggacaaacggttcgtgttgggaaacatcaattcgtgacgccagatgcgcaacagcctctgcaagaacaaaccactgtttacgttgcgatcaatgatcaatatgcggggtacattacgtttatcgatcatttacgaccagaagcaccggccacgatgcagacgctccatcaactggggattacgcgtttgatgatgttgacaggcgatcaagcgacaactgcgcaccagattgcggaacaagtcggaattgatgacgtccatgcaggctgtctgccagtcgataagattcatttaattgaacaagtaccgcaagaccaacgcccactaattatggttggtgatggggtcaacgatgcaccgtcactggcaagtgctgatgtcgggattgcgatgggggcccatggcgcaacagccgcaagtgaatcagcggatgtggtgattctaaaagatgatttaggacgggttagtcgtgccgttcaaatcgcgcgtgacacgatgcgcgttgctcgccaggcggttttgattgggattgcaatctgtattgggttaatgttgattgccagcaccgggattgttccagcattagtgggggctttattccaagaggttgtcgatacagtttcaatcttatatgcattacgagctagaacggatcgttaagggaattaaaaagagccgtattaacaccattcaagtgttaatacggctctttttttgtttatttttcagattgtacgtgtaaaaccatgtcttttggtaaatataacttaggcaccatggctaaacaaatacatagaacgatgccggttagaatgaagctagcgataaagctgccaccgttaacagtgagcgagtatagccaagcattcatacctttgggagcgtatgagccccaataaacggcaccggctaagaagtggcagaagtattttgcaaaagtaccaaaaaatgcggccatccataaaagggtcatcgttttgacttttgtatgattttgaatacttgcttgaataggtcgttgtaagatacctgctaaaccaacaaccatgaaggcaatggtaaattctagcaatccttgccatacgttcaagacactaccgtttcctaatccacgtaagattaagtctagtagaccccagattaagccggagaccattccaggaatggcaccacggcgtaaactgtagattacaatagggataatcccaaaggagacttcgattgcggaaggccccactgtatgggggatgtattccaatgccacggcaaatgccgcgatgattgccccttcaatctgaatcaatagacgctgatgttgcataaaaataaccccttttcttgttcaaccaacacaaaaaaggagttatcatttcaactccatcacaattcctacgcttgtcttaacaaacaggttcgaagggtctgattaaaatcactctcagccaatggctcccctttgcgatggttaacatttaatttttaggaacgctttcagtatactcgatagctggtataagtcaagcaatgtgtaaatcgacgaattgatgtaaaccaaatgactgttagaacgacattgataatcgttgccaagaagagcactaatagtggctattcaagctggtccattgccgagcgttgttcatcagcaacgacgtgcgtatataagtgagtagcttgcgtggtcgtttggcctagttgggtcgcaacaattgtttcactatgagttgccgccatgagatcagtggcaagtgtatggcggaacttgtgtggtgtgagacgcacgccaaatgcttcagaatacttcgcgactaacttttcaatggcatagttgctcatacgcttggcgctgccacgatagcgactgacaaataaggcttgttcattatcttcttttagatagcgtgatttacgaatctggcagtaatcccttaaaaaaggtaaactccacggagcaattgggacagtatcttgctgtccgcctttacggatcacggtaattgtaagttgttcaagattcaaatcgttgatgttggcttgggccaactctgatagtcggatgcccgttgccagcgccagtacacagatggcaatatcgcgttcgcaattttgcttgtatgatgccagttggcgattagaaagcaagttagggtaatcaacttgcatgaaggtgatgaagtcgtgtttcttttcaccggtcagcagttgtttgctgatgtgtcgtgaacgtgtcgccattgtttctgaagctttaagtagtttcaccttcttcatgacgtttcggtaaaaataaggctcaccatcagcttgttcggcttcaatggttaagaagtaccagagcgcatttaatgcgttaatcgagcggttaacggcttgaaaggagagcttatggttattttgtttacgcttattcattagaaaaatcttgtagagctcaatatcttcgagtttcattttttcgagtgcggtcagtggcatctggtcgatagaggggaccacgacgatctgttcatcaactaaccaggtgaaaaagcgaacgtattcttgtaagtattgatagagcgttgcagaagagtaggcgtttgcctggcggttaatgtagaatttacgaatgtaatccggaagattggcgagttgcttttcgcagagttctaagtaacgttgttgatccatgatggaagactccttaattagcagtttaaagatagtttagcaaaaatgaggtgagaatactacaagtgttgttaaaaccataattttaacaacacttgtattgcaaaccgttccgctgtattgcaaaccgttccgctgtattgcaaaccgttccgcgaactgatgatcagatggtcttattcgactatctgcacagcaacctaaagatccttattccgtttaaaagctggtatatcaacgtttaaggccttttttaacgatttgatatgtgagttttaaggctaagatgtgttaatatgcgtatttaccaattaaaatctggcataatcgtcagattaatcacggatttgtgcctgagcttagatgaattctgcatttaaagttaagtttggcgatatcggttggccagtcagtttgattcatcatattggcgttgagtaacttgtaatagtttatgaatcgtgcagtgtaaaaaacaaacgcgttaagtgcggttcatcaaatcaattgaatgatgttggataataagtggttattttagcgctctttcaagggataagcgtttcttcgcataatatatattatgtaaactaaaatagatttaaaaaattaactaagcctacccactcgtcaccagcgtttaagcgcagcaaaaaagcgccatattaaaatgacgcttctgtaattagtgatttaaaaactgagccaacaaagctgcaaagtcatttggattttggaataacgccatatgaccagcatctgggtaaagttttaattgggaatttaaaatccgttcatgtaattcatatgaaccattaacaggtaccattcgatcgtgatcgccgttgacaatcaatgttggttggttaatttgtgccaggtttgccggttgatcgtgcgcatactgtttaattgctattaattgacgacgataagtggctaacgtaatggctttatcttcaacaatttcacgctgttttaaccggttaatgaacgctttaccagcctgtttgccttggggcgttctggtgaagaagaggtattccttaacgtctctatgcgttaagaaggaccgaattaagtcaaaagttgttatgcgccccactttggcgatttctgagtcaccctggggacctgttccgactaaaattaagtgattaacgcttgaggggtattttaaagtgaaggcctgtgcaataaaaccacccatcgataatccaagtaaatcgaattgagtgagctgcatagctgttataaaagcataacaatcagctaccatttgctcaatcgtcgtggggactttgccatccgagaaaccaacaccacgattattaaagacaatcacgcgtcgttgctgactgatcaggtcaattaatgcagggtcccagttatctaaagtggctgataagtgattcaataaaacaagtggtaagccgcgaccggtacccacttcgcggtaagcaaaccgttggccttgttgatcttgaataaattggttgggggttgttagataagtcatcttgattagcccgcttgaaccttaatcaccactttatcagttggatggccgtgagcaacaagttctagtgcctctttaacgtgtgctaaatcgaattgatgcggatcgatggctggtacaatcgcttgttgttcaacaatttcagtgatttttttgagttgggcaccatctgaacgaacgaaaataaagcgatattcaacgcacgcttttttagcgaggcgatcccatttccgcccggccaacgagaataagagttgcttccaaaatggtaattgcaattgtttagcgaattgtttgtttggaccggcaatcaagcttaaaatccgcccgcccggcttcataatcgccatttcacgttcaatatctgctccaccgcgtgtatcaatcacgtaatcgatttgatctaaaacttcccagtaatcggttgttttgtaatcgatatattggtcagcacccaaattcaaaatgtgatctcgcgcggctgcattgcctgaaacaatcacggttaagcctagtgattttgcgattgggacggctattggaccgaaaccgcctgaaccaccagggataaacagcgttcggttcggttgggctgccaattcctcaaatagcccctgataagccgttaagccagtcagtgggattgcaacggcttcacgtagcgataaatcctttggcgtgtaccagattgcatcggtggtaaccgcgacatattcagcaaagccaccgattttagccaatggtaaacgcgcatagacttgatccccgactttgaaatcagtgacgtctgttccaatcgctgtgatttcaccggcaatttcattgcctaaagtcagtggtaaagcatagttttgcattaatttagtatcgccgcggatattcattggatccaatggattcaccgctgcataggcgactttgacgagtacttcattggctagcggttgtgggcgatcaatttcttgaatcgtgacagctagtgtttgattatattttttaatttgagctgctttcatattagaaaacctctttccacgggagtgtttgtagggtttgttgcacaattgctgttagcgtagttgaatctgggttcactttagccatgacccggataccaatgagcgcactttgaagcgatgcagctaaaagatcaattgcaacagacggttctagttcggcctggccggcaatcagtaatgcctgcaacagtgctttttcttgggttaaataatgctgaatcagcgtttggatgtctggttctaatgaatttaacgttgccgcggtattcaccactaagcagccggctggttggttatccggatggtcaataaatatttcaaaaatggctgttaagcgcgaccttaaatcggtatgtgttgccagtacttgctcgaaacgctcgttaatttggtcacgataatgtgctagtacttggataaacagttcatgtttatcgccgaatgtatcgtaaatactgcgccggtgaatccccattgcatcaactaggttttgcattgaggtattctcatagccttgttgccaaaagacaagcatggctttgtctaagacaaccggtgcttcaaatgtttttgtccgcatctggatgctcctctcttattagaacgttcattctaatataaacgattctttgaaataacgcaactagattttgcgcaattttaaggggcaataaaaaagaacgcctcgaatgagacgttcttgtcagctgttattttgtccgatagaaaataccaaacgcccctaggccaacgtgactcataatgaccgggctggttagtgcgactgtataaggcacatggggctgtgtttcttcaagcgttgcttggatcttagcggatagttcatccgtgattccgacgtgtgagatgccgatttccgcaacgtcttgggtggctaagtattcacggatattgttgatttcttttgtaaaagcttttagtccccgcccctttgcgacgacttctaattccgtatctgttaagcgcacaattaccttaagtttaatgattttcgttaatagcccggccattctactaattcgaccaccgcgttgaagcgcgtcaagtgaatctaaaaagacgtaggtttcggttttacgacggatgtcatcgagatgcgcgataatatcatcaagaggcttccctgcttcaacgtcttgggcggcagcaaccacttgataagcaagtccacggtcgattgctttactatcaatcacgtgtacgtcacttgttgattggtgggctgctgtgtgtgccccttcgattgtgccacttaacaagccggtacaatgaatcgatagaatcgtactaccatcagcccctaattgatcatataaatcgacgaaactgccgacagttggctgacttgttgttggaaaatcggtcgttgcattttgtaagcgacttaaaaattcagcgcgggtaatggtttgtccatcaatgaaagactcatttccttgttgaatcgttaaggggacgatgtgaatgtcatatttggcgcgttcgtctgctgtcagttgaatcgatgagtccgttacaattttaattgtcatatgagttgtactccttcaagttaaatgttgaggtaaattgaaaaaaacatcagggtcgttccgagcattacgaaaaagtgccaaatcaaatgtaagccaggaattttaggaaaactataaattagagcgccaacggtaaagactacgccaccactgactaacagccaaaaaccaactggactgaggttgacataaagggtcttaccagctaataaacataaccaccccatcacaacgtaaatcgttgtttcaatcttttggtaccgaccgtggctcaaaatgtgcgttataataccggcaatcgctagtgtccagattgcaatcagtaagctaattcctgttgcatggccaataaaaatcaaacaatatggcgtgtaggtaccagcaatcagcaagaaaatattgctatggtcgaatatttgaaacacgcgcttggccttggtaaatgctaagcagtgaaataaagtcgaagcgagatacagtagcagtaatgtggcgccatacactgctagactagcaatcgcgactggtgagagtgttttatgaatgcttttgaccaggagcatgatgactaacgttaaactaccgaaaaaaccaatcccgtgggtaatggcattccatatttcataaatcagttgttgtcgtttaatcgtggaaagttgcatggttctcgcctctttttctctatttgccgagtattatagcgcgaatgtagattataagtcaatagataatagaattcgattctatgttagtgacaaatgataattgctatggcataataaatatactatcaacagattggtggcgttaatcagtatgcaatcacaagaatttgaaaaatggttgggtgactttcaacaattgcggttaccattatggtctgaatttccagatttagacctctatatggaccaagtcattagtgaggtcaataaacgactgagtcctttgttggacgttaaaataacgaaaacaatgattaatagctatgtcaaaatggcgattattgaacgaccggaaaagaaacgctataatcgggatcatttagccgaattgattgtggtcagtattatgaaattagtcttcccgctcgatgtcattaaacaagggatttcgcaatcgttggcaaacgacaccgctggtaaggcatatgatcagtttgtgcggttatttaatgccgaaattgcgaatattaacgcgcaatcaacggttaatgaattcaatttaaacgaggaaccgctcaacattgttcaaaaagtagccgttaaatccgttatttataagctaattgggacgaagttggttaccttagaagaacccatttctatcttataagtcacaaaaaaagcctgtcgaattgttcgacaggcttttaaattaggctttatcaaaatctttaatccaagcaagtgcaatggctttttcaccaagatgggtcccgataactgggccaaagtagctgatatcaattggtaagtctggatagtttgcttgaagcttatcacgccatgcaatcgctgctggttcatcgttagcgtgaatgattagtgcgcgtaatggatagtcaacacgttcggctgtttcagcaaaaatttgttcagcgcgggcgtaagccttcttcaatgaacgaaccttctcaaatgccgtaattttgttagtgtcagcgtcaaacgttaaaagcggtttaatcttcaacatgctaccaataaaagcagatgcgtttgataaacgaccaccacgcactaagttttgtaagtcgttaacaatgaaacattcatccattgtgctttttagatcgtcaaggcgtgcgataatctggtcgacggtcacttctgggtcgcgtgccattctggccgcttccattgctaagtagcccattaacatcacagtaatccctgaatcgtatgggacaacctggatgttatcgatggtgcttgccgcatttttcaatgtcgtgacaaacccagagatggtactagcaaggtggatgctgatgacagcatcatacccttcgttgccgaggtcttcgtatagttttaacatttcacccagtggtggttgtgatgtactggggaatgtttcggatgtttttaatttttgatagaactcttcagtggttatatcaacgccttcatcatagacctggccatcaaggataaccggaataggtacgacgaagagatgatggtctttcacttgctgttctgtgagataagcggtactatcagtgactacagcaattttcatggtgacacctacttttttattattcggtaataactatatcataaatggtaggttaattcccctaaaaatgccgattttccgaaaaatgtatagggcgtctcattttaatggtcgattaaagctttgataataacggttcagtaggatttttaaaagttgctgttcatcggtactccagttttgttgaatgtgattttcaagttcagtttgaagttgttgcaacgtacttaatgccgttttggcggtcggtgttaatgcgtaaacgcgttggcgcggatcagccccggtcacttttgttaacagcccttcttgagccatcgtatttaactgccgactgagtgtcgatgcatcgagtttggttaacgtggttaattctgcgtgcgaaatgcgttcttgatcgggttcaatggccattagaatattgacttgggctaacttcaagtcgagtcgtagcgcccagtgtttcttttgttcttgatacaatagattcagttgattaaacgttgctaaggttgagcgcacggtaaatccccctttaattgtataaagcaatttgataattgtattatacaatagtcgtgttagcgattgcaaacaactaatttctttgaggttccactgcaaaaccgttacaataagtaagacaattcaattatagagagtgtgagcaataatgacctttgatggtttaatgacccacgccgttgtaaatgagctaaatacaactttagcagacggcaaaattacgaaaattcaacaaccttatccaaacgaagtaatcttaacgattcgggcaaatcgtaagacctatccccttctcctatcagcccacccatcttatgcgcgagtgcaagtgacgcgggtgccttatgcaaaccccgcaacgccaccgaacttcgcgatgtctttacggaagtatttagatggcgccattttagaaaacatcaagcaaattgaaagtgatcggattctaagattcacatttaaatcacggaatgaactgggggacttacaacaactatgcttaatcgttgaattgatgggccgccatagtaatgtgattttgattaatcaagcgaccaataagattctcgatttaatccggcacgtcggtgtttcgcaaaaccgttatcggttcttaatgcctggtgccgattatgttagtccaccggctgcaaccggggttgatggttttacgactgatttaaagacgcttgattggttaagttattataacgaagctgctgatgaacaagtcaaatggttacaacaacacttccaagggatgagtcgtgaaagtgccgttgaactacaaacccgtttaatggatcatgacaattatttggcggttgtgactgatttcttcaagcaattcgaccaagtgacaccaacgttaacagttggtgaaaagaagtcgtggttcacggccttcccttatgagagcctgacagggacactgagccattttgacacgttgagtgagctgttagaccaatattacttacacaaggcgcagcgtgaccgagtgcagcaacaaggtagtgcgctcatccacttcatccgcaacgagattcaaaaggatgaaaagaaactgaaaaaactacaaaaaacgttaaaagcagccgacagtgctgatgattaccggattaagggtgaaattttgaccacctatttgcgggaagtcgaacgtggcatggctgaagtcacgttgcccaatttctacgacaataacgaaccgcttaagattaccttgtcgaaccagattagcccttcaaaaaatgcgcagaagtatttctcgaaatatcagaagctccggaattcaattgcctacgtcaatgaacaaatggcaaagaccgaagcagaacttgcctacttcaacacgattatggcgcaaattgaaattgctgaacccaaagatttagaggatatcaaagctgaattacaggctgaaggttatttaaaggctaagaaaaccggtgccaagaagcagaaacgttacaagattagtgaacctgaagttttctatgcgagtgatggtacccggattttcgttggcaagaataactatcaaaatgatcaattaaccttgaaaaaagcccataaaactgatatctggttgcatgtgaagaacattcccgggtctcatgtgattattgatagcccagatccatcagaagatacgcttcaagaagccggcaacttagcggcctacttctcgaaggcgcgcttatcagcggccgtgccagttgattatattcaggttaagaagattaaaaaaccgaacggtgcgcgaccagggtttgtgatttacgaagggcaacaaacactttatacgacaccagacgagcaactcgttcaaaagctacgtaacaaacctgtgcaagactaataaaaagcgttactccaaagtgaattggggtaacgcttctttgattggtgcggctgatggcacacgctaaacgtgttctgcaagccattactttccggttaacactctattctaatgggcgtctgaccatgcttgtgggtcttggcgccattcattgagtgatgtggcttgttctggagttaagttatcagcggcttcttcgaccgctaataaggcggagaaattcgataaggtcgttagtggtaagttagcagttgcgaaattctgttggccggctgctagttcgtatgaaaagatgccaaaaataccaaggacttctgcgccctctttttgagcggcggccgctgcttgtaagacactcccgccggttgaaattaaatcgtcaatgaggactaatttttgaccggctttaaacggtccttcgatttgacggccttgaccgtgatctttcggtttcgaccgaatgtaaaccatcggtaagtcgagttcggctgcgacccatgcagcatggggaatccccgcggttgctgttccgccgatgacttcaacgtctgggaattgcgctttgattgccgcagctaagttgctggcaatgagcttgcggacttttggataaccaatcgttaaacggttatcgcaatagatgggacttcttagcccactcgcccaagtaaaagggttgttaggactgagactgacggcatgaatatcgattaaggcttgtgcgacttggtgtgcaattgttgtcatttgaaagactcccattctgatttgatagcttggtaagcttgatatggatttgtagcttgcgtaattgggcgcccaacgacaatcgccgagctctcagcttgtgcggcttcgtgtggtgttacagcccgtttttgatcattggtttggcttgttgctggccgaatcccaggtgtgacgcagagaaaatcagcattggtgtgttcgcgaatcgttggcacctcttgagcagaacagaccacgccatcgcaatccgagttctgtgcgagttgcgcatagtgtgcgacagattctggtaggctgacattaacgagttgttcggtttgcatttgcgcttcgctggtcgacgtaagctgcgtaatcgctagtagtttagcgggccgcacgttgccaagtgcggcgccttttttcagaccagccgcccctgctttgagcattgcctgcccaccagctgcgtgaatcgttgtgtaatcgacaccgagttggccgataacagtcatcgcgctttgaacggtgtttggaatgtcatagagttttaggtcgagaaaaatctgatagccgcgcgcttttaacgttttaatcagctgtggtccctcttggtaaaaaagttccatgccgactttaacgaataaggattcatcagttggaaattgcactaaaaaacgatctgttgtttcccagtttggaaagtcgagcgcgataattaaagggttagtcatgagtgccctcctgtggtagaccgaatgattttaaatcggttagttgatatttagcgagttcatctggtaatgcggcgattagttttggacaggcaaatggatcgctgaaattagcagtgccgactgcgatggcattggcgccggcggccattaattcaagtgcatccgcagctgttgagacaccgcccattccaataatcggtaatttcgaaattgaacggacttgatgaatgagccggatggcaacgggttttatcgctggtccagataagccgcctgtttgattagcgagaattggttggcgtgtttttggatcaatccgcatccccaccagtgtattgattaatgagaagccggctgcccccgctgcttcaactgcttgcgcaatcggacgaatatccgtcacgtttggtgagagcttcacgtaaaccggcacttggctgactgcaacacaggccttcgtcaacgtggcagcggcttctggtgatgtgccaaattcaagaccgccatgggccacgtttgggcacgagatattcagttcgatggcatggacgttgggcgcttggctgatttgttcacagacagcgacgtaatcagcttcggtattgccggcgacattggagatgattggtaactcgggataatgctcggctaaccagggtaatttttcttgcataatgacttcaatcccgggattttgtaagccaatcgcgttcaacatcccacttgggctttcagcaacccgtggtgtcgcattgccaagtcggggttctttcgttgccgctttgataataattgcgccaagttcgttgaggtcataatagcgaccgtattcctgaccgaagccaaaacacccggaggcgggcataatcggattttttaaagctaagcctggtaaagttactgctaagtctgtcattaaatgagcacctcgttcgttttgaagacgggtccgtcatcgcaaattttgagctgaatgcttggatcacgtttgagtttggtgacacaggcgtagcaggcaccaatcccacaagccatccgttcttccaatgagatataggcattgggatgctcactgaatcgattatcgacggccattaacaagccttttggtccgcatgcgtaaatggcatcatatcgggttgtcgcatcagcaaactgtgcatcgagtaataaaccaacatggccttggtagccgtacgagccatcatttgtcgcataagcgactggcccgagcttgcgaaagtgatcttcatagaaaatggctgctttagttgcaaagccgaacacgtgttgaacgtgaacgccttttgcattaagttgccgtgagagttcatgtaatggtggaatcccagtcccgccaccaatgattagcgcgttttgtccggctactaattggtcaattggataaccgttaccaagaggccctaagacggacaagcttgtgcccaccggtgattcacttaagatcgtggtgcctccaccaacaacgcggtataacaaggtaatcgtgttagtttggcggtcgacattggcaatcccaaatggccgacgtaataaaagggcgtcactggggattttgatatcgacaaattgtcccggtgcaatgggttgctgtgcgaggtctccggtgaggcataattcatagatactgggggcaatttcggtttgcttagtgagggttaattggtattctaatggcaacatttagcagcctccttctgatttttatgtaataaaagagccttaggcaaagggcttcagactcttttagtggttttaaagtggtttggtcaggagcgattgagattctaggaccgctaagatcgcatcagcggtatccaatgaggtcatcaatggaatgccgtgttcaatggcggtttggcgaatgacgatgctgtctttagcgacttgtggggcttcgttcaagccggttgtgttgatgaccagttgaatgtggccggctttgattttatcaagtaaatcgccgctcgtagcattaatcttggcaacggattgcactggcacacctgctgcttggaattcttgactagtcccaggcgtggcaatgatttgatagccaacttcgcggaagcgttttgctaattcgagcgcttgtgtcttatcttggttagtaattgtcattaagacgttcccgtgacttggtaagtgcatcccactagcttcgaacgctttatagagtgctttttgcatcgttacgtcagttcccatgacttccccggtcgatttcatttctggcccgagtaagctatcaacccgcgtgagtttcgagaatgagaagacaggtgctttaatatgaattagtgggcccgctggtaatagaccggttgggctctttaattcagctagtgtgctgcctaaaatgacttgggtggccagttgcgccatcgagatgccggtgactttactcaagaatggaacggtccgactagcccgtggattgacttcaatcacgtagactgcttcattttggataatgaattggatgtttaacaagccgcgacattcaagtgctaaacagagcttggtcgtgtaagtgatgatggcttgtttttccgcatccgtcagattttgtggtggataaaccgccattgaatcgcccgaatgaacaccagcgcgttcgatatgttccataattcccggaattaagacatctttgccgtcacagatggcatcgacttcgcattctttgcccattaagtagcggtcaattaggaccggttggtcgactgaaactttaacggcctctttcatgtaatgtgtaaggtcttctgcagtatgaacgatttccattgcccgcccgcctaaaacgaaactaggtcggattaagaccggataaccaatctcttcagcaatcttcaacgcatctggcgtattggttgcggttgccccgactggttgtggaatgtcgagttcggcgattaattgatcgaattggtcacggtcttcagcgcggtttaagttcgcgacgcttgtcccgagaatctgcacaccattttcggtcagtggttcggcaaggttgatggctgtttgccccccgaattgcacaatcaccccttctggtttttcgagttcaacgacgttgaggacatcttctagtgtcagtggttcgaagtacaatttatctgaaattgaaaagtcagtcgaaactgtttctggattactgttcatgataattgcttcgtagcccgccttttggatggcttgcacacagtggacggttgcataatcgaattcaaccccctgcccaatccgaattggaccggaaccaatcactaagattgaaggctttgtgctgacaatgctttcgttttcttgttcgtaagtcgcgtagtaataaggtgtttgtgattcgaattcggctgcacaagtatcgaccatcttataaactggctgaatgccactttcttggcgcatttggcggacttgggcaggcatgatttgccaagttgcggcaattttagcgtcggcaaagccatttttcttggcgagttcgagtaattctaagtcacctttatcggtccggagttgttcttcaatttcaacaatgtggctgagtttatccaggaagaaaagatcaatttttgtcaattcactaagttcttgaattgaataaccgcggcgcaatgcttcggcaaggtagaaaagtcggtcgtcttggggatgtacaatccgttggacaaggtcgttatcaccgactgccgtcaatgctggaatttcgagatggtcagtaccaatttcaagtgagcgaacggctttgagtaatgcttcttcaatgttgcgtccaatggccatcacttcaccggtggccttcatttgggtgccgagttgccgatcacctttgttgaatttatcaaatggccaacggggaatcttcgcaacgacgtaatcgagcatcggttcaaattgcgcataggttgtcccggtgattggattatgaatttcatcaagtgttaaaccgatggcgattttagccgccatttttgcaattggatagccagttgctttagaagcaagggctgatgaacgactcacccgtggattgacttcgataatgtagtagcggtcgctattaggatcaagggcgagttgaacgttacagcccccttcaatcttcaaggcgcgaatgattttaagtgcggcatcgcgcaatgcttggacttcacggtcacttaaggtttgaacgggtgcaaatacgatggaatcgccagtatgaatcccgactgggtcgaagttttccatgttgcagacgactagcgcgttgtcatttttgtcgcgcatgacttcgaattcgatttccttgaaaccggcaatactttgttcaacgaggacttgtccgactggagataggctaagcccgtttttgacaattgtgctcagttcaccggcattttcggcaatcccgccaccagtgccaccaagggtaaaggctggacggataatgaccggatacccgttttcgttaacgaatgtttgggcttcaacgagtgaatgggcaatcgcagattctggaatcggttcgtttaactgattcatcaagtttttaaacagttcgcggtcttcagcttgatcaatcgcgctgagcttggtaccgagcaattcaatgttcagctcggcgagaatcccgttgtttgccagttccaaagccatatttaatccggtttggccgccgagggttggtaagatggcatctgggagttctttgcgtagaatttgcgtgacaaagtcaatcgtgatcggttcgatataaaccgtatcagcaacggctttatcagtcatgattgtcgcaggatttgagttaattaaaacgacttggtagccttcttctttaagcgctaagcaggcttgagtgcctgagtaatcaaactcggcggcttgaccaattacgattgggccagagccaatcactaaaattttatgaatatcggtacgttttggcatcactaaatcccctctttactatttttggcggcgattgaagtcatcgatcatgtcgataaattcatcgaatagatgtgcagcgtcgtgtggaccaggggctgcgtctggatggaattgaacggaaaaggccggatattgtctatgacggagaccttcgactgtttgatcgttaatttcaacgtgtgtaatcagaaggttttgtgggtcgatggagtcggcatccacggcgtacccatgattttgagatgtgaagtcgatccgtttggtggcaacttctcggaccggatggttgaaaccacggtggccgaacttcatcttgtaggttttagccccattggcgagggcaaaaagttggtgaccgagacaaatcccgaaaatcggcactttaccttgaatccctttgatcatttcaatggcttctggcacatcttctggatcaccagggccgttggttaacatgacgccgtctggatcgagactcagaatttcttcagctgttgtgttgtatggtaagacagtgatgttacagtcgcgttttgacagttcacgaaggatactatgttttaagccaaagtcaatcacgacgatgttccgcccgttagcaggactcggataaggtttggccgttgagacttgttggacttggttttttggtaagaccaatgccttgagttgatcgaacgcgtgatcgtctgcggcatcaacgatgctggctttcatggtccctttatcgcgcagacggcgagtgagtgcccgcgtatcgatgccggcaatcccaggaattttcttttgctttaaaaagtcatcaagactcatattcatccgccagttatttgctaggcgtggtgtttcatgggcgacaactcctttacaggttggtttaatcgattcaaagtcgtcgcggttgaccccgtaattaccgattaaagggtatgtaaaagcgatgatttggccgttgtatgattgatcagtaatggtttcttggtacccactcatcccggtgttaaagacgatttcgcctgtcgagataattggggcgccaaaaccggtgccggggaagatggtgccatcttctaaaataaggtaacgtttcatcttttagttcactccttttttgaacgtgctttcatcaacaacttcttgtcctttacgacacttgtcaaatcggtgtctgcaacaccaatccgccaagtcaggtaaatgctcagaagttacccgttgatgacacactccttttgatatgcaatctgaccagcaaccaaggttaataaagtatcaccttgcactgcttcgccgataaatggcgtgttgtggcctttcgataagaaagtgtttgcgtcgattgtggtggtatccgttaaattaaaaacagcaaggtcagctggttggccaaccgctaactggccggcgtgtggtaagttgaaaacatgggccgggttggttgttagccagcttgtcagttgcgcgagactaaatggaccgttggcaactaaatgcgtgtatagcaagctaaaggctgtttcactccctactataccaaatggcgctttcaataacgcctgttgtttctcttctgtggtatgcggtgcgtgatcggtcgcaataatatcaatcgtcccatccattaagcccgcccagagtgcttggcgatctgcaagtgttcgaagtggcggattcattttgagcattgcgttgtcactggtaatcgctgaatcatcgagtaacaaatgatgtggggtgacttcgcaagtgacgttgaggccatcttgttttgcgcggcgaacgagattgacggtttccttagttgagatgtggcagatatgataatgaacgccggtcgcccgcgctagctcgatatcccgggcgacttgggcggattcactgacactcgcaattccgggaacgcctagttttttagcggcttgaccgtcgtgaatgacgccgccattgacgagtgattcatcttcgacgtgcgcgacgatgggcatgttaatctgggcggccatctgcatcgcttggtacattgtttgtgccgtttgtaccccatgaccatcgttggtaaagcctgctgcaccagctgccttaaacgccgacatgtcgacaattgtttgttcagttaactcattggtaatcggtgcaaattgatatgtgtggacgctggtttctgcctgattgcgtgcaaccagtgtcttgaaatctagcaagttatcaggtacgggctttaagttcggcattgcaattacgctagtaaaaccaccgtgggcaaccgctgcgctccctgttttgagtgtttcttttgtcgtgaagcctggatctctgaagtggacgtgtccgtcgattaagccggcactgacgaaatggccgtgtgcgtcataaatcgtttctgggtcggttgggactgcggtaatcgttggttcaattgccgtaatctgaccggttgcatcgatggcgatgtcgcgtttttgcagttggccgtcaatcaagacttggccgtttttgatcaattgatacatagcagatccccctcttaatgttgaatcagatgttgttggtctaataggtgttcaatgatggccatccgcataaaaacgccgttggtcatttgtttaaaaattcgcgattgtggggcttcaacgagttcgtcggcaatttcaacgtcacgattgacgggtgctgggtgcaaccagatagcactggacttaaggtgtgctgcccgctcagttgtcaaaccgtactgagtatggaatgcagtgtcagataaggtttcatcggcagcaaagcgttcgtgttgaatccggagtaacatgacgacgtcaacttctggtaagacgtcatcgagttgggctggttgtccgtattgggcaaattcaggggcgaaccattcctcagggccggcaaaatacaatgttgcgccgagttgtttgagcagttgcatatttgaccgtgccacccgggaatgacgcaagtcaccacagatgacgacttttaagcctacaaagtggccgaactcttcgtgaatcgtcattaaatcgagtaagcattgggatgggtgttgcccactcccatcgcccgcattggccagtgccatgtggaattgatcatctgcgagtaaggcgtcgtaataattattctgagaatggcggacagcaacgaaatcgacgccaatggcttgtaccgttttgagcgtatcgctgagggtctcgcctttggaagtcgaactcgtatcggcattgaagtctaagacggtcatgccgagtttgcgttctgccatttcgaaactcgtatgggtccgtgtgctattttcaaagaataggttcattgcgtagaccggccgagttaatttgcttgtcgcgccctttttaaaggcgctagcgcggttgatgagacctgcgactaaatcattggtgagttgatcaacggaaaccaacgcgttatgcttttgcattttgttgagcctccaattcaagttcgctctttgctttatccggtaaaacaaggtttaagacaatcccaaggacggtggcgatggctagccctgagaattggtattggcctaattgtaagtaggcattgccaatcccgatgacgaggattgatgaaccaatcattaagttgcgtttcttatcaaaatcgacttgtttgtcgattaagacgcgcaaaccgcttgaggcgatgaccccgaagagtaagaagctaatcccaccaattacgggtgtggggatgctttgaatcaacgcgctcagtttgccgatgaagccgaagatcatggcgaagaatgcggcgccacctaagacccagacactgtggactttggtgatggcgaggacaccgatgttttcaccataacttgtgacgggcggtcctccgacaaaagcggcgatgattgaggctgtcccgtccccggctaacgtgcggtgaagaccaggatctttaaagaagttacgcttggtgagtttgtttaagaccataatgtggcccatgtgttcggtcattgtgacaaaggcaattggtgccatgctgagaatcgcgccccagtacagaccgggtttgtaagtgacaaatgggacttggaagtctggtactttaaaccaaggggcgtccatcacgggttgaaaatcgacgatcccgaacaagacggcgatgatgtagccagcaatgatgccgagcaagatggggactaagctcatgaatcctttgagatacatattaaagccgatggtgattaacaacgttagtaaagcgactgcgaagaattttaagtcgtaattcccgtgggcattgatagtggcttgtttggcagctgtgccagcgagtgataagccaatcaccatcacgattgggccgacaacaatgggtggtaaggctttgtcgatccagtcggaaccaatcagactgactaagattgaaacgattaagtagactgccccaaccgccattgtcccttgtgcaatcccaggatagccagtcgttttcattaaagcgagcattggcacgatgaatgagaaactcgaccccatgtatgctggaatcttgcctttggtaatcaagaggtacattaaagtgccgaccccggaactgaataacgcaatccctgggtttaaaccgactaagattggcactaggacggttgagccaaacattgcaaacatatgttgaatggataaaccaatccatttaccggtgctgggtcgttcgttgacgtctaagaccgcatcgggatttctaaattgtgtagccataagtatttcctccatgtcgacgactttttgaaccaaaaaaagacacacgctccaacagattggtaggtgtgtcccttgacggacttaggcccctttttttaggcgcactaagttcaagacaaacccttttgctctctctggagacaattaaacggttcagtcgttatttagttagtttttcgatggtaatcccatcatgttgatcaatttcttccatcgcaacgcgaatttgttcgttgagcgcggttggaatatttttaccgacaaaatcggggcgaattggtaattcacgatgaccacgatcgactaagacagccaatgaaattttctttggccggcctaagtccattaaggcgtcaagcgcggcccgaatcgtccgccctgtgtaaagcacatcgtcgattaagatgacatgcttatttgtgatatcaacgggaatatcgctcccgttaatctgtggttcattttgtgtatcaagatcatgttgatcatcgcggtataacgtaatgtctagtgtaccgacgggcaatgcgatgccttctaattgttcgaggcgttctgcaatccgttgggcaataaacacgccacgggttttaatgccgacgaggacgagatctgaaatccccttattctgttcgataatttcgtacgtaatccgagtaaagacccgtttcattgtgttactgtcgaccacttctttgaccatcgtaaagactccttccaaacaaaaaacctctcaaaccgataaggtcgagaggttacagttagggactccgcgtctagtggtgctttcaccgtaccttctcggcctcacgggaccgattttaaaggcttctattaagttagacctagcttaacggagaatccttgatttgtcaatgattttcacgtaattcggttaaagttttctcgaagattgcgggtaatggggcttcaaagcgcatcatttcgcccgtcgttgggtgcttaaagcctaatacagcagcatgtaagaactgaccatgcccagctaaagttttgcggggaccataaacgggatcgccagcaactggccggttaatataggctaagtgaacgcgaatttgatgggtgcgcccagtttctagtcgacatttgattaatgtgaagtcttcaaaccgttccatgaccgtaaaatgcgtgaccgctgggcggccatcttcgacgattgcttgtttcatccggtcgacttttgaacgaccaatgggtgcatcaatggtcccctcgtcttcttcgatgttgccgtggactagcgcgatatattcacgtaagttttccttagctttgagttgggcggataaagattcgtgggcttcgttggttttagccaccatcaaaagaccagaggtatctttatcaattcgatggacaatccccggccggaagacgccgttgatttcagacaatggggtgtgcgccaataaagcgttgaccaatgtcccattcgggtggccagctgatggatgaaccaccatcccttgtggtttattgactacgaggacttgatcgtcttcatagacgatatcgagcggaatatcttctggggttaagtcgagcgtgacagggtctggaatattgacggtgacgacatcccctgttacgactttgcggttactcttacaaggttgatcattgacttgcaccaagtcttttttcaaccattgctggatttgtgaacgtgagtaatcgggtagtaattgggtgagcgccttatcaatccggcctgtttcagttgtaatcgttaattgtttagtttcagtcatgagtcactttctctttcaacaaaatagcaataaagacgcagatgacgcctactgttaaggcaacatccgcaacgttaaagatggggaaattaataaattcgatttggaacatgtctacgacgtacttaaggtggagccgatcgatgaagttaccaagtgttccggctaacagcaacgttaaaccgatccggtaaaatttttcagtgcgatcagaggtataaaataagtagccaattaccccgagggccacaatggtgacgaggtagaaaaaccactgttgaccggccaagatactccacgcagccccatcgttttgaacatacgttaaactcagtacgttcggaataacgggttgggttgctgcaaaggcaacatgggcaacaatccagctttttaaaagttggtcaccgagtacaatgactgcggctaaaacgatatagatgagcatgggaacctcctattcatacaatctaccattgtccttaaaatcggctgacttgtcaatcagttttcgagatgggcgttaggatattggaaaacgtgcttttcaagctaactttctgcgcttaaccaaatttgccaaatcgccgattgtatcggcaattcgtcaaattctattaatgctcagaagctaaccgtttcaaacgcactctagaataatccgctaatcaggccatcttctgtgacgtccatgttgagggcggctggtttctttggtagacctggcatggtgaggactgtgccggtcattgcgacgatgaagcctgcgccaagctttggaatcaattcacggacgtgaacggtgaaatcagttggtgcgcctaatgcttttggatcgtctgagagtgaatattgtgttttggcgatacagactggtaagtggtcccagccatttttttcgatttctttcagttggttgatagctttgccctcgaaaacaacctctttaccgccatagatgtcagtgacaattgtggttagtttcgattgaatgtcggcgtttgaatcatataatggttggaagtttttaggttgatcgagtgcttctaagacggcctgggctaaatcaaggccacctttaccaccatgtgcccaaacactagctaaaacggctttgacacccagttcagcacatttttcttggagcattgtaacctctgcttcggtatcacttgtaaactcattgatggcaacgactacgggaatgccgtaacgttgcatattagcaatatgtttggctaagttactaaaccctttgtctaacgcaccgagattttcagtggttagatcagctaaagcaacaccaccgttgtattttaacgcccgaacagtggcaacaatcacgatggtatccggagtcttgccaagttgtgggactttgatgtctaggaacttttcagcacctaagtcagcgccgaagccagcttcagtaatcgcaatatcacccatttttagggccgtttgggttgctaaaatactgttacagccgtgggcgatattggcaaatggtccaccgtgaattaaggctggtgtatgttcaagcgtttggacgaggtttggtttgagggcatcttttaaaagcatcgcgattgcaccggtgatttcgagctcgccaactgtgacgggttgccgatcataagtgtaaccaatgacgatttggctaatgcgccgcttcaagtcagtaatgtcagttgctaagcagagaatggccattaattcgctagcaacggtaatgtcaaaaccatcttggcgcggcatcccttgcactggaccaccaagtccaatgacaacttggcgtaatgcacgatcattaatatcaagcgcccgtttccaaataattcggcggggatcaatgttgagggcatttccctgttgcagatggttatcgattagggcggctaaagtattcacagcagcggtcaatgcgtgcatatcccctgtaaaatgtaagttaatatctgccattggtaccacttgggcatagcccccaccagttgcgccacctttcatccccatgacggggcctagtgaaggttcacgtaaagcaatgacggctgattgatctagttgacgaagggcgtcgccaagaccgacagtcacggttgatttaccttctccagctggtgtgggattgattgaggtcactaagatgagtttgccatcttctttttctttcaatcgattaatggcagcgaaattaaccttcgctttatacggtccatattgttctaaatcagcggccgttaaaccagcttgttcggcaattgccgtgattggctgcatctccttagcttcattttcctgtgctatttgaatatctgacataccgcccagctcctttttatttatgatactacctagtatagctgattacgtacggaattggcagatgggatgcttaaaaagaacgatattcttcgacacacttctttgtacgtggtaaaatgagcgcgtacgctgattaacatttcaaggagggattgtgatggaacgaggaatcgttaagtggtttagcaatgctaaaggttatggcttcatcagttatggagatgacgaggaggttttcgtccattttaccgcaatccaaactgacggctataaatcattgaataaagacgagccggtattatttgagattaaagaaggcgcccgcggtttgcaggcagctaacgtgcaaaagatagcagaataaaaatacgtttaaacgctaaaaaagagccacgacaagattaatgtttgtcgtggctcttttttatttaactattcttcaattggccaaccattttgtttcagttgttcaacgaatgcctgcttggctttgcgactaaggagtatttgttcgggttggtaatcaagttcgttggttttaattaataaaccatgtttttggacaataatggtcgtagtcgtttcacggttgatggttcgattatatttaaataccggccgtttaagcgtgatcacgtctgccgtcattgaaacacgatgcccgaaaatgacccatagcgtcaaccaaacggcaattaagccgatgccccacgattgccagtttaagttgatgagttcaagttgtacaattaaagctaatgtatagacgaagccaatccaagaccaaatcgtcacgaagtaagcataatttggttggtagaatgcggtggttgtcttttgcatgagaacactcctttttacgctttgtatcataccattaacctgaccctgctgtcagtgaaaggcggtaaattttaagaatgattaaactttatacggacgcagcaactcgtggcaatcccggaccaagtgcggcgggaattttaatcgtgacaccagagcgacaatatcaactacaagcacctttgccagaacagtccaatcatgatgcagaattttcggcggtcattcttggcttagaacaactagccaatcgggggcttaccacgaaaatactacagattaacgttgacagcaagcttgtctttcagagcctagaaaagcggtatgctaaacattatcaagctgccgtcgaccggattctagcacttgaggcgccctattcaatggtcatccaccaatggattccagagcgtcagaatcagggggcgcaccatctggcccaacagggattacctcatttaactgactgttgataggcttaactagcgctttgagcgtgattttagtaaaataataagcaacgctagaattttggaggagtacgatatggttttagttacagaaataatgtcattcatcatcttcattaatgccttattggcaattattacaattctgagacagccccgcgatattgcggccacctgggcgtggctgctagtcttaattttactacccgtgggcggttttatcctatatatgtttaccggacggggcttatcgcggaaaaagattttccaaagtcaatcgcaaatcgatgatgggctttccgcattggtcgacattcaacgtaaggaaaatcgtaaaaacgacctcttaccgaaaaagatgctttccagtgaagcatccgaaatggtgaatctctttttaaatattaataatgcacccgttttaaagaataaccatgtcaaaatctatactgacgggcaagcaaagtttgacgccctctttgccgacatcaaacaagctcaaaaaagtattcatatcgaatattatacgatctataatgaccgattgggcaatgagttacaacaactattgattcaaaaagccaaagaaggcgtttcagtcaacgttgtctacgatgcttggggctcccaaggcgcaacgcaaaaatggtggcgcgcacttgaagatgtcggtggccacgcgcgaacgttcttcagttcaaaacacacgattaccgattttcgcttgaacttccgtgatcaccgtaagattgtggtaattgacggtaagattggttatattggtggctttaacgttggtgatcaatatctaggccggagtaagaaattcggacattggcgtgatacccatatgcggattaccggcaatgccgtgttagccttacaagtacgctttatgatggactggaacgcgagtgttgagtctgcgattaagttaacttactcggaagaactcttcccagtggaccaatcccaaaatcgtggatcagcagccatgcaaattgtctcaagtggtcccgataaattagatgaacaaatcaaactcggttatctgaagatgattagtaccgctaagaagcgtttatggattcaaacgccctatctagttccggatgatagtattattgatgcgttgacgactgcggcaatgtccggggtggatgttcgtatcatgacgcctaacatgccggatcaccccttcatctaccgtgcaacagaatactacagtcaactcttgcatgcagctggcgttaagatttaccggtatgaagatggattcttacatgctaagacggcggtcatggatgggcatatcagcactgtaggttctgccaatatggatatccgtagtttcaagctgaactttgaagccaatacgtttatttacgatccgaaagttgcagcgcaacttgaagcgatctatcaggctgatatggaaaaagcatccctactaacagacgaaataatcgcccaacagtcaacttggttgaaatttaaacaaaaattttcacggttactttcaccaattttataaaatgttcgttaactcatttttatgatggtgcaatattaaattaatcccaatctaaaaaattttttaaaatctgttaagctttgtccggcgtgcttttgaaaaattttgcgcattagcagggattgactttacccataaatatgtttaacttaagtacaggacgttgcccaagacaatcaaatgaacattcgtaaacgaccactataattagtggtcgttttttgttttatctacaatatgtggtgtttattgattgcatcttccatttcaaaacggtatactatttttatcgataagagaaatacaagggagttaacgattatggcaaatatcacattatatactaagaacggctgcccacaatgccggatgacgaaacactttttagaaacgcacaacgttccttttgttgaacataacatcaatgacgaaccacaatatattgattacttgaaggaacaaggtttccaagccgttcccgttttagaagcggatggcctagaaagcttctcaggttttagaccagcggaattgcaaaaattggcgatttaagcaccatgcattcccagttttaacgggtgaggccgactcttgattactaaagagttggtcttcactttttttaaaccctaaaacagctaatatgactagaaagtggtggcaaggatgtctttaaaagagattaaaaccgaagatgtaacatactatgaattgaataaccaaattaatattccagtgaatggtcaaattccattacaaaaggatcaagaagcactcgatgcctttttggaacaaaacgtacaacccaatatggtgacgtttaaatcacttcaagatcgtctagattatttagtcgcggaaaattattatgaagcagattttttgaaggcttattctctttcattcatggaagaattgaatcaatatttaaaggaccaagacttccacttcaagtcatttatggctgcttataagttctatgcgcaatacgcattaaaaacaaacgacaatggcttttatcttgaagattttaaagatcgcgtttttgtgaatgctctctacttcgcagatggtgatcaaacccttgcgctgcaactagcggatgaaatgatccaccaacgttatcaaccggcaacaccatcgtttttgaatgctgggcgttcacggcgtggtgaattagtttcatgtttcttactccaaacaaccgatgatatgaattcaattggtcggacgattaactcggcacttgaattatcacggattggtggcggggttgggattagcttgtcgaacctccgtggagctggcgatccaatcaaaggcatcgacggtgcagcaagtggtgtcctacctgtcatgaagttattggaggattctttctcatactcaaaccaattaggtcaacggcaaggcgccggcgtggtttatttaaacgccttccatccagatgtgattgctttcttaggtgctaaaaaagaaaatgcagacgaaaaatatcgtttaaagaccctctcattaggcttagtcgtccccgacaagttctatgaattggtgaaagctgatgctgatatgtatttattcagcccttacggtgttgaaaaagaatacggcgtacctttctcatatgttgacatcaccaaagaatatgacaacttaatcgccaacgataacatcaagaaaaccaaaattaaagcccgtgatttagaaaatgaaattagtaaattgcaacaagaatcaggttatccttacatcgtcaatgtggacacagccaatgctgcgaacccaattgatgggaagatcatcatgagtaacctctgttctgaagtcctccaagtgcaaaccccgtcacaaattaataaccgccaagaatatgacgtgttagggacggatatcagttgtaacctgggttcaacgaatattccgaacatgatgacgtcacctgactttggtggttctatcgaagccatggtgcgtgctttaacctacgtcacagatcattctgatattgatgtggtcccttctgtggctcatgggaacgaattggcccacaccattggtttaggtggcatgggtctgcataccttctttgccaagaaccacatgatgtatgggtcagaagaatcaatcgactttaccagtaattatttcatgcttttaaactactggacacttgttgcttcaaataagattgctaaggaacgtcagatgacctttgccaactttgaaaagagtaagtatgctgatggtagttacttcgatcaatacctcactgaagactgggcccctaagacggacaaagtcaaagcgattttcaaggacattatgattcccacaaaagccgattgggaagctttaaaactagccatcatgcaagacggtttataccatcaaaaccgcttagccgttgcaccaaacggttcaatttcatacatcaatgatacttctgctagcttacaaccgattgttaaccggattgaagatcgacaagaaaagaaaattgggacaatctactaccctgccccaggtctttcaaacgataccatgccatattatgaatcagcttatgacattgacatgcgtaaagtcatcgacatctacgcagcagcacaaaaacatgtcgaccaagggatgagtatgacactcttcatgcgttcaacgattccagcaggcctttacgaatggaaaaacggccggactgacaaaatgaccacccgggacttaaacatcttaagaaactacgcccaccacaaagggattaaatcaatctactacatccggacttacacagacgacgaaagtgaagtcggcgcaaatgcatgcgaaagttgtgtaatctagagtgcgtttgaaacggtttgactttgagcattagtctaactcggcgaataactgcttataagcagttattcgccgagtgtaactaagcgcagaagtcagtttcaaaaagcacgtttcaaaacagagtgcgacggcaggcgtttatattttgagcattagcatagggaagcgaattagcgaagtagtcgatgatttgattcactgggctaagcgcagaaagttagcttgaaaagcacgtttcaaagcaaacaccaaatctccactccagctgctcgtcagctggcctacatacctaaaaaagaagcacgttaaaaggagttcatgaacatggcagaaaattatattgcaattaactggaaccaagttgaagatcaaattgataaagcaacctgggaaaaattaaccgaacaattttggttagatacgcggattcccctttccaatgacttagatgactggcgcagtttaccagacaatgaaaaatggatcgtcgggcatgtctttggcggtttaaccctacttgatacgctacaatcacaagatgggatggccagcttaaaagccaatatccgcactcaacatgaagaagccgttttaaacaacattcaattcatggaatccgtgcatgcgaagagttattcatccattttttcaacgttaaacacaccaactgaaattgatgaaatcttcgactggaccaacacgaatgaattcttgcaatacaaagccaacaagattaacgatatctatcaaaacggcacaccattgcaacaaaaaattgccagcgtctttttagaaaccttcctcttctattctggtttctataccccactctattacttagggaacaataagttggccaacgttgctgaaatcattaaattgattatccgtgatgagtcagtccatgggacttacatcggctataagttccaattagccttcaatgaattggataagtcagaacaagaagaattgcaaaactggatgtatgatttactgtacgacttatatgccaacgaagaaaaatacacccacgaagtttatgatggcactggttggacagaagaagtattaacttacctccgttataacgccaacaaagccttaatgaacctcggccaaggcgccctcttcccagatagcgctgaagatgtgaaccccgtgatcttgaatgggatgtcgacttcaactgccaaccacgatttcttctcccaagttgggaatggttatcgcttagggaatgtggaagcgatggaagatagtgattacgactttgattaattaaatgcaatagcgcgccccactaatttaagtgagacgcgctatttttttggttattttttaaattgtttcagatatcgtccggccaataatttatgaaacttaacgcccaacgtcggatttgaggcatcaatatcggcatacatcgccgttgtaatcttgttgagtagtggcactaactggtcgagttctgcctcggtcaaggcgttcacaaacggtggcacctcttgattggcagtttcaatttcttgacgaccggcatccgttaagttaactaaattaacccggcgatcacttgggagcttacttaacgtcaccagctcgcgtttagcgagtttagcgacaaattcactggttgattgaggtgacattcccaaacgcgttgctagttcacgttgcgataagtgatcttcatcagcaagtgccaatagaatcttcccctggccttcgacgattaaatgcgggcgtgcttgtttaacgatatcatcgtagatcttactgagttgttcatattcagctaattttccggcgaccaattcggccttgacactctttgccatacgtcatcttcccttcgctgttttaattagtatacaccattccaaaatctaagagtagcaatccttgacattttaatcaggtgacctgattattaaatgaggaggcaatattatgtgcagtgagcatgtcattgaagtaaacaatattcaaaaagcatttgggaccaaaaaagtggtgcgttccgtttcgctagccgtttctaaaggtgagattttcgcattattagggcccaatggtgccgggaaaacaacgctcttaaaaatgatgaccaccctcctacgaccagatagtggcacaatcacattaaatggctttgatacgataacacaaagccgccaagtgcgccaacagtttagtgtcaccaatcaaacagcggcaatcgatcaagacttaagtgcgcgcgagaatctccgcttatttgggcggttaaatgggctcagtgccaaagcgagtcgaacccgagctaacgagttactgacggactttgatttggaccaatcagcggatcaaacattggcgactttttcaggtgggatgcggcgacggttggacttagcggtcagcttagttggcaagccaaggatcctctttctcgatgaacccaccactggactggatccaagaacccggacgcaaatgtggcatgcgattcaaaaattagtcgcggatggctcgacaatctttttgacaacccaatacttagaggaagcggatcaatatgcggatcggattgcgttgattgatcatggccaattgattgccagtgggacacctagtgagctgaaagcgcaagtcggtggtcagcagttgcagctgacggttgccaatcaacaacaagttacccaggctcagacgatttgcgagaccgttttgcaacagcccgtgcgtgtgacggatcaaacaatcattggaccgttagtgcacgatgatatgggcgtcatcaccgcgattttaaatcaatgtcagctggcaggcatcaccatcagcgatttacaattgacagccccatcgttagatgacgtctttttgaaaatgaccgttggtaaaaactaaggagataataacatgctacaaatgaaaacaaatacgcaagtgttgcgcaatagcttaacgttaacccatcggaatttactgaagaccttgcataatcctgataatgtcagtgatgtgctggcgccctaccgctaattttggcgcactcatgatggcgttattcctagctgtctttattggctggtcaacgtcgtggattttcgccttagtcggtttactggttaaaaatgtcgaactgattagtagtttatcgatgatcatcattctggtattgaccttcttatcgaacgcctttattccagttaaaaccttaccgcattttctacaaaccattgtccgcattaatcctgtcaccacaaccattacggcaatcagaggaattttgaacaccggtcattggagcggaaccgcaacaatggtcctcgtcagtggcgctgtgattattctggtgtttatgccactgacagtcatggcgtatcaacggcgtgactagaataaaatagcgcgccgcacttgtaagatagtgagacgcgctattttagtttaaattacttggtagtcgatttgatcaatcttgattttgggtaattcatcaatattcttgtctgtaatgatagcgaaagagacatacgcgcgatcattttcaggaagctcttcgtaagtgatcgtgccgtacgcaagtttaaacagcttagcatgcttacctacttgatctttagcgattgcaaacacatttggctggtcaaaatacgtatttgtagtttgttctttgccaccttcaagatagtgtttcatagcagtggcatccttgatgaacccttttacagagtttagcactaaataatcgttaccgacgcgataaatataaccagagactttcttttgattcgaatgagtcgtagttgttaatctgattgttccatgtttaggtaaactagtcccttttttagtctgtgttttggatggtgtatgtgtttcaatggaacgattgcaaccagtcataaaaaacattgtgatagatagtaataaaataaagactggcattatttttttcatagtgattgttttctccctgatcattgaatttgataaattggatagcgattgtagagcgggtcgtttagattggctgtggcaacaatggcttgtagtgtgaagtcgcgtggaatgcccactgtgaccatcccatagccaaagtcttggtgtggtttaaactgattatcggcaataaaaatgaagccgtcttcgtccagtttttgataggaatcgtgcgctagtgtttgcgtagttgtttgactcaaaaacgttttgagcttatttttcgtattcagttgttcattcggttgatgcgcaatgacgaaaaaggttttatgccggtaagacagccaataggcttggacatcttttttgtcgtaagtctgttggttttgtggacgcaccgtttttttctgcgaactatgctgaggcgtcgttgtttttgcaggatggttctgacaggctgttagtcccaataatgcaacggtcagcgtcaatgttagccagagatgcctgattttcataagatcagtccttcacagtttagtttaccccctataattataacagttacgcctactttgactagtcttaaatattaagttttatcgaaaaacgataaaaattaattgtttttcaataaaaaacgattataataaaactattcttaaaaacgaggtatcagatgaatgttaaaaaaatggctacttagaatggcattactcggaattgcggcggtatttggtctgttaagtttgttagtgacgatccaaattgtgaccacgaaacacttagaatacccagcgacaatctggatgttggcgattgctgcgtatggtgtgacggctagtatttggtttgcattaatcaagttggcgcagattctccgcttaattgagcaccatcaagtttttctccctcagacgctacgatatgtatcagcaattagaaaagcgattttggttgcgagtttgacggccctttttgccctaccctttttctaccggattacgcaactcgaagatgcaccaggcttgatgttgctggggttaggcctggtcttcattccgtttgcaatcctcattttgatgcagattgttgaagatctttttaaaagtgcaatcgcctttcaatctgaagtcgatttaacggtctaaggaggaattcaatggccattcgtgtgaatttagacgtaattctcgctcaacggaaaatgagtgtcacggcgcttgctgaacaggtcgatattacgattgcgaacctttcgaatttaaaaaccggtaaagccaaagcaattcgcttttcgacgctcgagaagttatgtcgcgtattagactgccaacctggtgatattttagaatatagcgatgattaatcctgcggcccccttttatcggggaccgcttttttaatgcttcagtacactggttgatgcgatatgtagtataataaatccgtagtgattatgaaaggggttttatgctgatgtattacgttgtgatgaagtcaaatgatattcgccgaaacttggcaaccgaacaatatttaatgaatcaaaaaaatttcgatgaaccactcttactattctacattgagaaaccatgcattatcgtgggccgcaaccaaaatacgtatgaagaaatcaatcaaaaatacgtggaagaccatgatattacagtcacacgccggttgtctggtggcggtgggatttatcaagatctcggtaacctttgtttcagtttcgtggtgaacgcagattctgaacaattcggtgatttcaaatccttcacgcaaccaatcgtcgatgcactccatcaaatgggcgccacaacggctgaagtttctggtcgcaatgatatgttagtggacggtaaaaaattctcagggaacgcgatgtacaccaagaatggtaaaaccttctcccacggcaccctttcatgggatgttgatttagatgttttgacccaagccttgaatgtccctgcagataagattgtgtcaaaaggcattaaatcgattcgacaacgcgtcacaaacctaaaagggcacgttgaccctgaataccaaaacatgtcgacagaagagttcagagacgtcttattactgaacttgatgcacgccgatcaactagctgatattgccgaccgcgaatatcaattaacggccgcagacgaacaagccatcgataagatttttaacgatctctatagcaattgggactgggtctatggcaagtcacctaaatcaacgattcaaaaacgcaaacacttcgatttcgggacgattgatgcgcgcttgttaatcgaaaatgggaagattgccaacgtcaagttctacggcgacttcttcggttccggcgatgccaacgaattggctgaaaagttagtcggcacggtttatgaccgtgaacatttagcaagcactctcgaaccaatcgacaccacgtcctacttcacagggattccaaaaacagaattagttgaattattagcacaatagtaactagctaaaaagagctactaccaaaataatcttggtagtagctcttttaggttaacgtgcaaatcgtttaaaacgaatcgtcatgcgtctggtttgcatgaagtgttgacaaataccagcaataactaatgggatgaggatgcctattaccccactaatccagaaaatcggttggtggaatagatttgcgagttggttcattggttgatcaccaggaatgttcaggacaaaagtatccacccagcttggtaacatgcgttcaatcgctggttcaatgtagtgttgatagagtgtcgacagaattagccatgcagcaaataagaaaagccaagctttacgttcaaataacgtaatgaaactgctaatggcaatcccttctgccatgatggtccagatgagtacaatggccagcaggacgaaacggctatcaagaaagaagcgattaatcccactttggtgggcagcaatgaagtatgtgccgccgtagagtgctaggaaactaatcaattgactgctgaagaggctaatcacttgggtggtataactaatactgcgcggaatgccatttagaatcccaaaattaaacggcttgcgggttgtcgcaaacgaaaggaaaatcagaacgagttggctgacgactaaggaaccgctcaagagcgtgaaccaaaaggccttccaggtcatttggttggagaagattaaaatggaaccgcctgtgatgatgacgaagacggcaattgccattaataagccgcgccaaatcgctgctaggcggtaccgcatcattgcattaaacatgtgcttcacttcctttgttcgttaatttaatgaaagtttcttgtagatcgatatggtcaatcgttagacgatctggaataacccgttcttctggtaagacgtcataaagataaaccgtgtataaggtccccatttgctgggaatctaagacgtttaagtcggtacagtactcgcgaacaagttcttccgggccactgacacggtaactcttggcgaggacggtttccaaatcatcatcgacaattaattgagcgtcgttcaagaccaagacgtgttcgactaaggtcgcgatttcttcgatgatatgggtcgcaacgacaaatgtccgtggccgactttcataggcctgtaaaatgtagcggtataagaggctgcggtagttagcatctaagcctaagactggttcatcgaggaaaacatattccgccggcacacaaagcgcaacaattgttttaaaaatcgtgcggtacccagttgaaagctgattgagtttcttttttggattcaaatcaaatgcagtcagcatttctttggcgagtgcatgatcaaatgaaccttgcagtaaggcggtatttttaataatggtccgcaatttgtcatctttattaaagagattgatttccgacatcaagtaaatcgtttgtaacggatgatcgcgaccggttaagaccgtatcgccccatttaatctcacctagggatgcagtttgatgattggctagaatacttaataaggtactcttacccaccccattgcggccgagtaagccgtaaattgtattgggtttaagtgttaagttgatgtcgtcgaggacgacctgtttcccaaattgtttaatcagttgtgtggtttgtaaattaggcatggtcataacccctttcaatcagtgcaattaggtcgtctttggttagatttaattgttgtgcttcagtgataaattgggcaacatagtgttcaaaaaattcagattgccgtttttcagtgatctgtgcgggtgcgcttgatgtgacgaacatgccgagtccccttttcttttcgattaagccgctggtaacgagttgattcatccctttgagtacagtggctggattgatattgaattgtctggaaatttcagttgtcgatgggacttgactaccaggtggaaagaccccagtaaaaataccctcttcaatttgttcggcaatctgccggtagagtggtgtatcattattaaattcaaaaagcatccggaacacctccgtttcgttaattggttagttacttatgtagttaactataatacgtaggctgcgaaatgtaaaccgctcctcaaaaacatttgattattcgttcatattcacctattatgtacttataatcaaatgttttcagagaggatgagaacgatgcagacagcctattgtttcattgatttagcggatagccgcacccgttttacggaacaagcacagacactccagttattgcaacacttcgccgacacgttgaatcaccattttccagcgttattaacaccatttgcaattaaggatggtgatggtctattgggcggtttttcagcggatgaccaggcacagattgttgatgtctatcccttttgtaatgcctatttaaagagtgacgcttttcaaactttctggcagacacattttgcggggctggcggagcccactttttattttggggttggcttaggaacgatgactacgccgagtccaagtgactatcaggatatcaatcgggtcaacgggacagcaattgtgaacgccctcgccgcagcagatcaagccaaactgttgcgtcaaggtgctgaattagcacaaggttatccctttatgacgacggcctttcaatttcaattagtggcagatcaaccagccgcaaatgggattaatgccctcttttatttaatttatgagcaactcttgaatacgcagttgcgcaaggacgcttttgctgaaatcgtgcttcaaccaacattgaaacgctatgaattagcggaattgttgtggaccaaatacggcgttgcttcctatgaactagactacagtgatcaaaaagggcgtgcattagcctctagtaaagtcagtcgcttactgaatcagattcagtatcccttgattgaacagaccctggcaacgttgcgcgcgcaactgatgacctttaaggaggcagtcgaatgaacctctttgcgcttttcttgcttagtcatattggctgcgactttgtctttcaatctgatcagatggctcaatgcaaacgatcaacgaaactcggtgtgaaatggtggccattatgcaagcacgcactgacacaagtcccgttagtgcttattttatggggtggcggttggttaatggcaccacctacttggccacattggcaaccgttactaatcggcttagtcatcattgtgatgagtcattggctcattgatctatttaagcaaaatagccagccacttttaaaagcacagctacatttaaccagcaatcgcgtaccagtgatgagttataccatcgatcaagcactccatttaatagtgatcggtcttgtgagcatgttcctcggccagcaatgggcgtttaaccatgtgaaccgattgttattggctgccagtattgttttgagcacgttattatttgccgattatttcattagcttctatttaaaaggactggatttaaacatggatcgcctgccagatggtgcaaaactgggtcggcatattggtcatttagaacggtttgccatcttaatcttgttttacacgcacaatgttgcgagtattgctgtgattgtggcgattaaggcgctgacccgctttaaagccattgaatccaacgaacaccacttcgccgaatattacctcattgggagtttgctcagtctgatcttcggctgtcttggcggttatctattaagtcttattgcgcattaaaaaagtgccacagaatcaggatttttcctgttctgcggcactttttatattattcagcgatgattaataatgatttaatcgctttgcgttgatccattgcttcataagcggcttgaatatcatctaaggtaaagcgttgtgtaaagactttaccaggattaatggcaccctttaaaacagcatccaataaacgagtgcgatcatgagtcgttacggcagcaattcccccacgcaaaccgatgttcttccggaataaggcattggtgttcatctctgctttttggggaatgccgacacgaccaatgacagcccctgcgccagcaacggcgacggcagtggcgacggattgttcggtcccgacacattctaagacggcgttggccccagcgttgtcggttaacgccatcacttttgcgaccccttcgtcaccgcgttcagcaacaatgtctgttgcgccgaattcaagggctaatttttgccggtccgcatgacgactcatcgcgataatccgtttcgcaccgagtaatttggcgccaatcacaccacataaaccaacggcgccatcacccatgacaacgactgtgtcaccgggtttcacttcagcggacacggcagcgtgatagccggttgccatgacgtctgaaagcgtcaatagattattcagcatttcatcagagtaatcgcttggttggccaggaactttaacgaggccccagtttgcattgtgataacggagatattcggcttggtagccaccaggattattctcgcggttggtacaatcgccatcaaaaccgtttaaacaagcggcacagtggccacaaccatgggtaaatggcacgatcacaaaatcaccgacactaacattttgtacgtcagtcccaacagcatcaatgatgccaattgcttcgtgaccggtgaaaccgcctacttctcgttttgaaatcccacgataccaccataaatcagaaccacagacgcacgcgcggataatgcgcacgaccgcatcggttggtttttcaatcgttggttttggtgcttcggtaatggtcatttgaccaggacccataaaagtagctgttttcataactataatctcctatctcttcctattatattgtctttactatacaccttagacctcactttaatgcaagctttttttaaagtccaatcgccagttgttgtttcttgcttaacacttcgtcttgggtaatcccaatataatggagcgtcgtttcttgcgttgaatgaccaaaatcaatcatcaatgaccgcacgtccccgaattgtttgtagaaccagtagccgtaagttttgcgcatcgtatgggtgccaatatcattacgcccaagtttcttacctgcttcagtcaacatgcggtaaacaccgttgacggtgatgtggttatcgccgacgcggctaggaaacaaccaatcattgcctagcaattcattattttgaatatagggactgatgtatgggcgtaaactcgccaaactaatttggcgccacttacccgttttttgttcaacaatcacgggattgtcttcgatcacatctttgacttttaactgcacaatatcagaacagcgtaagccagtattaatgccgagtaaaaataataaataattgcgactacccatttgtgaatggcgcaagatgactttcatgtcttcaatctcatcttttgtccgtaaaggttgaacatttaattttttgccttttttagtgcgcgatttccgcatgttttttccgcctttttgaccgcattctttttctctatatcattataaaccatgcggtggtattttgcacctttgattatcgttgatttaaagggattccgagcgcattctttctaccaaaggaatgcgctcaaacacattaaaggctattgatggctaaatcacggtctaatcacgtttataaacgatcaatcaccagaggcgcattttaaggacgtttcagattagtgagtggacaagtggtcgcgaaacttgcttaaaatgcgaattaaaaaaggccccttaaagtcacaaaaaaaacagcgttaagacaaaaagtcctaattatttggagagttgtccgagcggccgaaggagcatgattggaaatcatgtaaatgggtctaacctgtttcgagggttcgaatccctcactctccgttaaataataaatgacatggcccgttggtcaagtggttaagacaccgccctttcacggcggtatcatgggttcaaatcccgtacgggtcatttttttggaggtttagctcagttgggagagcgtctgccttacaagcagagggtcacaggttcgagccctgtaacctccattcggtcgcatggtctagctggttaggacgcctgcctgtcacgcaggagatcacgggttcgagtcccgttgtgaccgtcttaaaaaaagcgtaagcaatttattgcttacgcttttttgttgtttaatcattttaattaaagacgccagtgattaatagcaagtatccaaactcttgtaaatagcagttacgtttgattaggccgagttgtaacgcaattaataataactggccacctgcaaagagaattaaatgccaaccgtgaattaaatgcgttaaaatcactgcaataataatgcacgcccatactacataactgaggatagtaatcatccgattgtgagtcgttagttcgagaagataaatgatgattaagaataggcctaattttacgagtaaatcctcggggataaagtgaatgccactgaaaatctgagtaattaaaaagaaaaatggggctagtaagaattgaaatgataaccgtaacgtacggtctttgaactggtctgggtagataaaagggattagaacaaaaatgctagtaatccctgatagaagcccaatcaaaggtagatcacgccagccgatgattgcggctagaataattgcgactaaaagggcagcagttgcaattattcgctttggtttataccggggtgataagacgagtaaaatggctaatagcgcccctagaatcgcagttagataaaatgaaagcccgaattgctttggaaaagaccacattgtcagcccgacgattaaaccgagatttaaataattaaacaaagtcagtaattgtggctgagttgaagcctttagatgttgttggttaaggtagaacaatagcaacacttctttcttagaatatgtgtctcatcttaactttttttgaaaagaaggtcaacggcttttgaaatggattgtattttgtgctaggatagtagagttataagaagttcccgataggattcacacaccgtgaagaggccttgtaaccgacacatatatagggggaaacatagaaatgcaagaaagacatttatttacttcggaatccgtttctgaaggccatccagataagattgcggatcaaattagtgatgccatcttagatgcgatgttagcacaagatccacaagcacgagttgcttgtgaaacaaccgttacaactgggttagtcctagttgtcggcgaaatttcaacaacggcatacgttgatatccaaaaagtggtcagagagactattaaagggattggttatcgtgatgggcattatggctttgatggcgataactgtgctgtgattgttgcacttgatgaacaatcacctgatattgcacaaggggtcgacgattcagttgaatctcgtgcaaaggatgaagatccacttgataagattggtgcgggggatcaagggttaatgtttgggtttgctgtcgatcagacaccagaactaatgccgttaccaattgccctttcacaccgtttaatgcgcaaagtcgctgagttaagaaagagcgggcaactcgcttatctaagaccagatgctaaggcgcaagtcactgttgaatacgacgaaaacgaacaacctgttcgtgtcgataccgtcgttatcagtacccaacacgatgcagatgtgactttagaaaccattcaaaaggatatgcttgaacaagcgattcaaaccgttattccagccaaatacttggatgatcaaaccaagtatttcattaatccaactggtcggtttgtcatcggtggaccacaaggcgattcaggtttaactggtcgtaagatcattgttgatacttacggcggttatgcacgtcatggtggcggtgctttctcagggaaagatgctactaaggttgaccgttcagcaagttatgcagcccgttacattgctaaaaacattgtagcggctgggttagcgcgcaagtgtgaagtgcaattggcctatgcaattggtgtagcgcaacccgtttctgtttcaataaatactttcgaaacagggaccgtcagtgaagaaaagattcaaactgcaattcgtgaaaactttgatttacgaccagcagggattattcaaatgttagatctacaaagacctatatacaagcaaacagctgcatatgggcactttgggcgtacagatgtcgaatttccatgggaacgtttagataaagtggatgccttaaaggcaagtattgctaaactaaatgcctaatgtattattagacgagtaaaagaggcggcctttccttagcttatttgagttaagaaaaggctctttttatacccaagaataagagagggagctaagaatggaacaaagtaagggaagaaaaacgaatgtattactcgtgacgattgcgattttcgtcgcaactttcatgacagccattgaagggacgattgtttcaacggcaatgccaaccatcattagtaatttacacggtatgaaattgatgaactgggtcttttcaatctacctattaacgaatgcgatgatgacgccaatctatggtaagatggcagatcggattgggcgtaaaccaatcttcatctttggtttggccttgtttgtcatcggatcatccttatgtggattgtcaaatcatatggggacgttaattatttcccgggcaattcaaggcttgggagccggggcgattatgccggtatcatttacgattattgctgatatttatccgattgaaaaacgggcgaaagtcttgggttttaatgggtcagcatgggggattgcctccatcattgcgccgcttttagggggcttcattgttgataagttgacctggcattggattttcttcatcaatgtaccgattgggattattacgattggtttaatctggtacttccttcaagaagagaagaagacgagtgctgaaccagtcgactattggggcagtttatggttgatggcggcccttttgagtttactatatggcttccaagtcatgggtgaagccaaaccgtcagtgctcgttttagggtcaatgctcgtgattgcagtggttgctttttacctctttatccgcgttgaaaaacatgcacaagatccgattatctcattatcattatttaaaaatcgaacatttgttgtccaaaatgcagtggctgctttagtgagtggtttcttaattggttttgaagtctatatgccaatgtggatgcaagggatcctcggattgaaagcctcgatggggggctttgttgtgacgcctagttctgtgatgtggatttttgcctcattatgggcaggcctattacttgttaagcacgcaccacgaacaattctagccggtagtttgtgtattttacttgttgggagcttcatcttagcattggtcccacaaaccacaccgttttggttcttcttattagttgctgctggtttagggattggctttggcttaatcattaccacgacgactgttacggcacaaagcgttgctggtgctgacaaagttggtgttgcaacgtcgtttaatacgttaagtcgaactttaggtcaaaccttgatggtttcagtttatgggattattttgaatcggcaattggcaaaagggattgctggtgatggtcgattagatcaaaacatgttaaatgaattgattaatccagaaactgctttgaacttacctaaacaattattaccaacattacgccatattctatacaatggtttacacttcatttattttgcgtcaattgtgttaattgccattgcaattattattaatttaatggatcgtaaaagaagtaaataaaaaagattgaccaatacggtcaatcttttttattttaatggaataagacacagacgccttcaggtgtttctaagtctttttgacaggcggttaataaaccagtttgggcatcgcgccgataaagcgtaccattatcactattttggttaacggctaatagaaaatcgtcgttagcggaaagattgaagtcacgggggaattcaccatccgttgacatttgttggattgctcgtagttggcgactgtcatcactgatggcatacacaacgattgaattatacccacggttggaagcataaaggaaacgaccgtctttggaaacacggattgcagcgccgccgtttgtttcatgccaatctgcaggtaacattgagtaggtagcaaccgcgctaaaagtcccatcggctgcatgataatctaagaccgtcacttcactggacaattcacccaataggtaagctgtcttgtgattgggatggaagactaaatgccgtgtgccaaaaccaggttcactcttgtaaattgctactttggttaattgaccagcattgtcgacggcataagttactaattcatcggtgcccaaatcacagaccactaagcggtggtcaggtgttaggtcggtataatgtacgtgggcgctagcttgttcaggacgcggaccgtggccttcatgaactgtcgtgctcgctaaggttaaactgccatcggcttggatttgataaacgagtatttcgcctttatggtaattggctgcataaacgagttggcggtcttcatcgactgccacgtatgctggtggtgcgccggctgctaagaccgcgttcaaaaagacaggggtgccactagctaagtcataggcagcaatcccaccttggtccccatctttaatgacggtgtagaggatgttgcggtttgaaatcgttaaataggatgcgttatcgagattaatgaatggttggatgtcactcacggttgcagttgttgcatcgaaaattccgcggtagatccctttaccaatccggcgggtataaccaccaattaaaacttcttctgtcataatcagactcccttcgtcaaatactctttgagtatagcatattcctgcgaaaacgatttaatttgttactaaaaggattcactagtcgctaaaactaagtcgcgaatatgctacaatgatactatcttaactaagaggagatttcattatgaacacgcaagcagaagtcatttcaattggcaacgacgccattgatgatcaagaaccgatggtcattttattcgatgaacatgcgacaactgccattcaaaacgtggcattgattcaacattttatggacgaagcggccaaaaaacagctaacactgacgacagattctacggttattattaatcaacaaccttatacgattacgtatgtgggcgcgttggtaaatcctaacctcaacagtattggtcatgtcgctttagtttttggacctgcgccacaagaagatcaactgcaaagtgggctttatttaacaccagccgccgcgggtgttccggctgttcctgaattcaaagtaggaacgcagataacgtatcaagaaactatgtaggaattaggtgaattggtgtgacagagaataaacagccacaaacagaacgttcatggttctttaaatggtttttaaataagaagctaccgattgttttgttaaacatgttattaacgttgctgattatacttttattaacaaaacttgcttggctgttaaaaccaattcagtcgttgatgttgattatcgggttaccgattattattgcggccgtcttgtattacttgaccaacccgttaattgattggtttgaacggcgttggcatttaaatcgggtattgtcgattacgattatttttattttaattgttggcttactggtctggggaattgcgacgattattccaatcattcaatcccagacaacgagtttaattgatcagtggccgtcttattgggcgaatattcaaactcagacgatgaaatggtttaacgacccagccttcaaatcgattcaaaaacaattaaacgatatcaatacggatgtgtttagtaatttatcaagtaaagtaaataaaatgctgacttcgaccgttagtcatattggaacagcggtcggagtggtgacgaacgtagtcatcgcgattgtaacgatgccgttcattttattcttcatgttaaaagatggtcaccgaatgaaaggctatttgttaaaattcttcccggttaaagtacgcgccacaactgggaaagtgttggaagaaattaacacacaggtcagtcagtacatccgcggccaattgacagtagcgttttgggttgcagtcatgtttactgtaggctactggattgttgggatgaagtacgggttgacgttgggaattttagcggggattttaaacttaattccgtatttaggctctttcctagcgatggtcccgtcagtgattattgcagcgtttatctcgccgttattattgattaaagtactcatcgtgtttgctgttgaacagaccttggaaggtcgtttagtttccccattggtcttggggagcaagatggcaatgtatccggtcacgacaatcattgtgttgctggcttcaggaaagttattcggccttgccggtgtgattctcggtattccagtatatgcgattatcaagatattaattagtcacctttttgaatggttcaagtcagtttcaggcttatacgagcaataaaaaacgcacgatccgtaataaatgcggatcgtgcgttttttggtttttagagcgttaatttcatgtagtggtgggggatgcccgcttccatttcgccttcgcttgtgacaataaagcctaatttttcgtagaaaccaatggcgtggtcctgtgcgaataaaataatataaggcgttgtggtgcgtttagcgtcttcaatgatggcttcgattaattgatagccgagtccttggccacggaaagctttgatggtagcaacgcgctgaattctaaatccaccgtcttttaagacgtgcacgcgtgcggttactgctgggtcttgattgaggtaacctacatagtgaatcgtgtgatcttcgtgcgcatcgatttcctgtgtttccggcatattttgttctcggacaaacaccgttcttctaatgtatgttgcatcacgaaagataacactgttatctccaagtgtatgtttaatatccatttgtttcacacccttttctgatcaatgtagacgctaaggttaaaagcgacacgggtaattatacagttgtttcaagtcggattcaaccatttcagagaagttttaggtacctaactaaaaagagccaaactaccgatttaaaaggtagtctggctcttttaactgctttttaaagcatgtcaccattaaaaattgaatggcgaacaagaacgtaatcgactttcttcaatgatgataagcgtttaccaccagcataagaaatcgatgattgtaagtcttggcgcatttcggtgagcgtgtcactaatcgcacctttataaggcactaaaatccgtttgccctcgacgttttggtgtgtgcctttttggaattctgaagctgacccaaaatattctttgaattgttgaccatcttcttcgactaatttgccaggtgattcagcgtgtcctgcaaagagggacccaatcattaccatgctagcgccaaaacggattgatttagcgatgtcaccgttggttcgaattcccccatcggcaataatcggcttggtagcagctttcgcgcaccatctgagggctgccagttgccaaccaccagtcccaaagccggtcttgattttggtgatgcaaactttaccagggccaatcccgactttggttgcgtctgcacctgcgcgttccaaatcgcgaacggcttcaggggtaccaacattgccggcaatgacgaaactcttaggcagtacttttttgatatgttgaatcatatcgatcacgacttgtgagtggccgtgggcgatatcgattgtaatgtattctggtagtaagttatcggttgcgagttgattaataaagtcgaattcatcgtctttaaccccgacactgattgaggcaaataagccgcgctcgtgcatcatcttgatgaatgcgggacgcttttcaggctgaaatcgatgcatgacgtagaagtaatggttttcggcaagccagatggcaagcggttcatcaataatcgtctgcatgttagcagggacgactgggattttaaacgtttctgagccaaagcggacgctagtatcaatctcgctccgacttttcacaatacatttattgggaatcagttgaacatcttcgtaatcaaatacgtccattgggaattctccttaaaaacgaacatttattttggataacacggaatttatccgtgcataacgtataataacgagcttttttatgaaagtcaaataaaaaacacattcgaacccaaagaatgggagaatgtgtttgatgatagtggccttttgtaagttaaacgggttctaatccgcaggagctggcacacgctctatttaatgtaccgcttgcgccagaagcgatagactagcacaccagaaatgatcagggaaatgaataaagtaatcaaccaacttgttttggagcgagacagtggaaggtccacgttcatcccgtaaaaactaaatactaatccggggatggtgagaataattgaataagatgccaagaacttcataacactattcatgttattattaataattgacgagtaagtatcggctgtttcgttaataattgtgttggaaatttctgccatttcgatggcttgttgattttcaatctgaatatcatcaagcaattcaatttcatcttcattaagatctaacatattggtccgcattaaactagcgagtaccattttatcggtctttaaggacatcatgaaataaactaagccgcgttgaatggtcatcagatcgaagagttcttcattctgtagggaactctgcaagcgagtttcgatttgttcacgagagcggttgatgtcccgcaaatattggagatagatggatgaaatgcggaagagaatctggaggacacttctacggtgattttgtggattgaaacctttaatttggccatcaacaaagctctgtaaaaaggtgactggcgttttgttgatggttaagacggtcgaatctgttacaataattcctaagggacttgttttatagaggtatttatctggtttttgcgggtctttttcaagaattggtatgttgaaaataatcagggtcgcattataatcaggatcgtgctcagcacgcgcactttcatcagcatctaaactatagtagataaaatcagatgggatgtggagcttcttagtgagaagctcaatttcttcagtcgagggatcagttacgttaatccaactgttggactggattttagcatgtttggtgagctttttcttagcactgtcgaagcgataggtttcgagcatggtgtcacttccttcatcaataacttactgttaagtctactggatattttaagaatgtaaagtgcggtataaaagaagtgcgttcaaaccgggtatcctttgaggattaacctagtctcgtgaatgagcgacagcgtcgatcgtttgctggacgtagttaaccgcaaaaggatggtttgaaagtacgttaagaaaagaagtgcgtcaaaagcggttatcctgtgaggattagcctaattagacgaataagcggcgtagccgattgtttggctaatgtagctaaccggaacgggatgcttttgaaagcacgttaaatcaaggagaatcagaaatttgaaaaaaattgagttagccaagcagtttttaacgacgaacttggccgtattacaatgtccaatctgtcaggacgtatttgcaagtgtagccgagcaccaattactttgtgtcaatgggcatagttttgacctcgctaaaaatggcacgttatattttttagcaaagcaaatgaagtctgaatataccaaggaaatgttgcaacatcgccgggcttttttacaagcagggttctttcaaccgttcttaaaagaaattgcatcacggattacccccgatagtttagtccttgatgtcggttgtggtgaaggaacgccagtgcaacagctcaatgcgcaagtttccgcgcgttatatcgggtttgatatttctaaacctgcgattcaattggcaagtgattacaatgccgatgcgtggttttgtgcagcagacttagcgcggatgccatttgctgatcaccagttagatacggtgctcaatatcttttcgccttcgcaatatcaagaatttaaacgtgtcttgaaaccgggtggtcaactaattaaggtggttcccaatgcgggttacttacatgagttacgggagttactgtatcatggtcaagctaaggaaagctatgatcatggtccggtcttagaattgtttgcgcaacattttccagattatcaagaaatgcaagttcaaaaaacaatgacgttaacacccgagacattgcgcgatttggtcgaaatgacgccattgacgtggacggcttctaaggcacaattagcggcaatcacgttagaagcgctacctgaaatttcattagatgtcacgattttagtgggaaaatgatgagaatttaaagaaagtttaaaaatctgattgcaactctaaaataagggcgctataatgtttttaaggaattttttccctaacttttatcagaatttattttgataaaagctagtgatgaaatgacactaacgtagtttctcgccgtgaataaccgagggactacgtttttttatttgcaaagcaaggtagagcttttgtgaattctattgtataattaatctactgaatcttttttaaggaagtttagaccgtgactaatcatattgtattatacgaaccactgattcctgccaataccggtaatattgcgcggacatgtgcaggaacagatactgttttagatttaatcgaaccattaggctttgaaaccgatgataaacatttaaaacgggctggtcttgattactgggaccaagttaagattaattatcacaagaacttggatgcctttttagcaactgtgcccgatcgtcaatatttatacttgattacgaagtttgctaagcaagcttattctgatcaagatgtgtcggatacaagtgttgatcattattttatgtttggtaaggaaacgaccggattacctgaaactttcatgcgtgaaaatgaagatcggtgtttacgaatcccaatgtccgaccatattcgagcattaaacctctcgaactgtgcggcattagtgatctttgaggcattgcgccaacaagattttccaggactcgaaaagagtcatttgtacgacaatgataaattaaaatagggagtgtttttgatgcaaacgaagaaagatccaattactgttgatgcttttcattatgaccgtgtttcacctgatgtagaaccacaacaaaatatccaagtcagcttagtcaccatcagcgaagaagatccatatttacaagaagctgatttgagcgcggggaatatttaccaaattgtgacgcctttccaagttgcaccagaaaagagtggctttgcagtgtcaggtcaaatttcacaagtggttcaactcttagatttctttggtgaaccaaatgaaattgatcaaaaagacatgatgaagctttcacgaccattgattgaatacatcgaaacattgacgtatcaagtgacggcggttgctttaaatcggggcgttcaactccaatttacagcgcaagccaacgaagactaatcagcgaaaggttgcggcaattttgccgtggccttttttagtaccgtgattaaaaacggtacgggactgacatttatgggtttagtagtacagatgttcgtgtataatggatagtaggatttaaggttgaaggagattttcatggccactaaaagtaaaaaaagaaaaccagcagcacgcaaaaagaaaaaacaacaaactgatttcacagttaacatcatcgggtttatttttattttaattagtttatttgcgggtttaaagctgggctttatcggcgcgctttgcgctaacgtattccgtctgtttgttggcgatacgttcattattagtgctattttattcgcccttttgggggtctatttgttgatttatggcaagcagccccccttatggcaccaaaagacgcttggatttgcaatcgcgtatctcgggattttaatttggttgtcagcattcgtcttgcaccatcaagcggtcaataaccatttcttggccgccacatggcagcttttattggaagacttccagaagatggccgttacgacggaagttggcgggggcttaattggcgccgcgttgtatggtgttttccacttcttgttcgcgcagatggggacttatctgatagccgtcttgattgtgattatcggcgtttttgttttcttagatattccattcagcgtcgttgttcagagtacacaacggtttgtgcatgggctctttaaagctggcggctacacgaaatcagggttccaaaaggtctctgaaaaaggtaaagcgcaagtcagtgctttaaaagaacagacgcaaaaagctgttcaaaatgcaactgaacaagcagaagagacgtcagagactaaagagcaaatggtcgcaacggatggtccagaaaatgcaccgaagcaaaaattggaaccttttaaaataaacggtcccaaggatctaccaaaaccaattgcgacgcaagcagaaccaactgcacccgaaccggtggctgacgaagatgagcatgttccagatgtggcagaactcgcaccactgaacgagacggatgatgattacgaattgccaacaccagcattattaacgcaaattccggcgtctgatcagagtgcggaatataaagccatcgagaagaatcaacaggtcttgaaacaaacatttgattcgtttggtgttgatgtgacggttaagagtgctagtctgggaccagccgtaacgaagtacgagattcaaccggcagttggggtgaaagtctctaaaattgttaacttagcggatgatttggcgcttgcattagcggcgaaggatattcggattgaagcaccaattccaggtaaaccgtatgtcgggattgaagtgccgaacacgaccgtttcgaccgtttcctttagagaaatgattgaacaagaacccccacatccaggcaaaccactcgctgtgccgttaggtaaagatatttcgggtaaggtcatcatgtcggatttagccaagatgccgcatttattaatcgccggttcaaccgggagtgggaagtccgttgcaattaacgggattatcacaagtattttaatgagtgccaaaccacacgaagttaaattgatgttaatcgatccgaagatggtcgaattaaacgtctataatggcgtgccccatctattgattcctgtcgtgacgaatgccaaaaaggctgcgaacgccttgaacaaggttgtaaaagaaatggaacgacgttatcaattatttgccgatacaggtcagcggaacatgattgaatataatcagtatattcaaggccacaacgaagacggcgaaattaaaggtgcaccactgccttatatcgttgtcatcgtggacgaattatctgatttgatgatggttgccagcaacgaagtcgaaagtgcgattattcgtttggcacaaatggctcgggcggcggggattcacatgattgtcgctacccaacgcccatctgtcgatgttattactgggttgattaaggccaatattccatcgcggatcgcgtttgctgtatccagtgggattgattcacggaccatcttagatggcagtggcgcggaaaaactgcttggccgtggtgatatgctttacatgccaatcgggatgagcaaaccattacgggtgcaaggcgccttcatttcgagtcaggatgtcgaaagtatcgtgtcgtttattaaagcacaacaaacggctgaatacgacgaagaaatgattccaaccactgagcaggaaaagcaatcaactgaagaaccagaagatgaatattaccaagaggcagtcgaattggtcgttaaacagcaaaccgctagcgtatcaatgctccaacgccgttttagagtcggctataaccgggctgcacgcttggttgatgagatggaaagccgtggtgtgattggaccatcagaaggtagtaagccacgcaaggtgttattacaaaacgtaccagaagaaccaacagaacaatagcgtgtgacataagtcaaatatcgcctaaaatggcgaataagcgcgtcagcgattgattgacattcaggattaactgaaaggcgctggttgatggaactcggttaaactattaaatgaaaaaggccgcgacaaaaaatacttttgtcgcggccttttttgagttcaccttctttttttggtatgatagaatccgtgctatgaaaaaggataagttgaaaagagccattttaactgttgaaacagtgaggagtaatataacgtgaatcagaaaataacggatggcgtctacctgaatattttacaaactaaccaatttaaaacaattagattaaccgttcaattaattgcgcccgtcacagctgatgggatgacccgacgctcattattagcgagcgttctaggtgctagtagccaagcctatcgtgaccaagtcgcaattgcgaatgaattacaagccatgtatggtgccggctttaatatgaatgcctatcgacaaggaaacttggcgatttttagcatctcaatgcgaattgtgagcccccaatatctacgggatacaatcgacttgcaagagcaagcgattgcgtttatcgggcaattattattgcatccagatgtggttgatggccagttcaatccggtcatttttaaccgtgaaaaagagaacttagtgcgttacatcgaaagtgttgccgatgataagcaatcatacgcggcggttgaattacgcaaactctattttaaagatgcgacgcaacaaattcccaattatggggatgcagctgatttagcaaccatcataccggatgaactatatgcgtattatcaatcgatgattgcaaacgatcgggtccaaatgacgtttgtcggtaatatcgacgaagccaaaacggtcgcggatttggcacaattgccatttgcaccgcgtaatgctgaactgccaacgattttttatcaacaatcgttatatccacaagtgcaaactaaaacagaagtacaaacggtgcaacaaggcaagttaaacatggcctatcaaatgccagcttacttctatcaagctgattattatgccacaatggtgatgaacgccttattcggtggcacaccgctgtcgttactttttaccaatgtgcgtgaaaaagcgagtctagcctactatgcctcaagtgcaatcgatgcttttcggggtgtcattacggtacagactgggattgaaagtcgccaaaaagatcgcgtcttagagattatcgaagcccaacgtcaacggattatcgcgggtgactttgaacaggcggtctttgaacaaactaagttggccttgattaatcaatttaaatcgagtctcgatagtgcggcctatttggggcaacaacaatttaatcgtttgtttgtgcctgaaactgaaattgatgcagagcgatttacacaggccatcttggcggtttctaaacaagcggttcaagaacaagccgcaaagatgcaattgcaagccatttacttcctgaaaggggtcgatacagatgaagcttagacaaaatccccgcttaggtgaaaccctctatgaaactgaattagagaatggcttgaccgttaaaatataccctaagagcggttatcataagacatatgcaatcttaacgacgaattatggttcaatcgataagacgtttatcccagctggggaaacggattatgtgacagtgccagacgggattgcgcattttctggaacataaattatttgagaaaaaagattacgatgcgtttgaaaagtttggtcgctacggggcaagctcaaatgcgtttacgagttttacgcgaacgagttatttattttcaacaaccagtcacttgcaagaaaatttggatattctacttgattttgtgcaggaaccttatttttcaactgagacggtcgaaaaagaaaagggcatcattggccaagaaatccagatgtataatgatgaaccggattggcgcttattctatacagtgattggcaatctttacccaagccatccggtgcggacagatattgccggcacggtcgagagtattgcgcaaattacaccagaagcgctctatcaagcacatgcaacgttctatcagcctagtaatatgaacctctttatcgttgggcaaattgatgatccggatgaagtggttgattggttgaacgccaatcaagcggcaaaaacatttgcccaaccaacagaaattgtacgttcattgcctgaagaagctgaagatggtcatgatatcattccgtatcggtcacttgaaatgccaattacgcgtagcaagagcatggtcgggattaaaggtttaacggattacggaacaggtgagttagcacttgaaacaaagttgaagatgaacttgttacttgaattgctatttggtgattcatcaacgcaagtgcaaaagttgtacgatgatggcacacttgatgatagttttggttacgaatttgccattcaacggtcatttaattttgtgacccttggtggcgatgcggacaatgcccaagaattatcggatgcgattattaatatcttagaacatgccacggaaagtcctgacttttcagaggataacttggcgttggttaaaagagccgcaattggtgaatacttgcaagcgttcaattcgctagaagccattgcgaaccaatatagtgatgaattctttaccgaaatcagtccatttgatgtcttaggtttgatcgaacaagtgactttagcggacttgcaacagatggcaaccgattatttcaaaattgaaacgatgacagtctgccacatcttaccggagggagcaaaccatgcctaaatcagccttaattatcggtgcatccggtgatattgggatgacggttgcgactgaaatggcggcggacggttggtcgctttatttacactatcatcaaaatcagacgcgggttacgacgctgcaaaagcaattgttgcaagactacccaaaacaggatttttttgcgcttcaagctgatttaacccaagaggacgctgttggaaaattgacaggccagctttttcaagtcgatgcggtcatttatacagcaggtgcgacgacgtatggcttattgccagaggtcagtgcaacggcactcgatcacttatggcaggtgcacgttaaagcaccaatgctattgatgcagcagctgcaagcgaaactagcgcaaagtccattaggacgcgtcgttttaattggttcaatctatggtggccggggcagtgcaatggaagtgccatatagtacagttaaaggcgcacaatccgcctttgtgaacgcctatgcacaggaagtggcatcgcttggaatcacaattaatgtggttgcaccaggcgcagttgatacgaaaatgaacaatcagttcacaacagcagaacgggctgctgttgtagcggagatcccggccggtgcttttgcaaccccagcgcagattgcctattgggtattgagtttaatggcacctgcagccgattatatgacgggacagacattgtacgttaatggtggttggttaaaataaagaaatcttaataatgcacatacgtaccaatatgctataattatggataatgatactgggataatagtgggtggaattgattatgaatgaaattggtcaaaaattacgtgaagcacgaattgaaaagggctacacactcgatgatttacaacaaatcacaaaaatccaaaaacgatatttaatcgccattgaagagggcaattttgatgccttgcctggcagtttttacgtgcgggcatttatcaagcaatacgcccaaacagtgggcttagataatgatgcattgttggcagaataccaagatgctgtaccagatacgaaaccagaagaatatgttgaaaaatccgttgaaaatcaaacccgattgacgcgcgaaacaacagattctaaatggtcgaaatggcgcaaccttgtcccacaaattacgattgtggcaattgtggtcatcattattggggtggtctatgggattgcgctcagcaaccgtggtaaagaccgcgaaacgttaaacgaaacaagctcatcggttacggtttctggggataaaccagatcctaagaaggataacagtagtgaagacaagtctgctgaaagcagtaagaaagccgcttctgaaagtaaggcacaagaagctagcaagaaagctgctgaagataaggctaagaagcaagaattaacggcgaagatgaccagcattaatgggtcacaacaagcttttgaaattaagaacttgccagctaaagccaaccaaattacgttctcagctgataaatcagctgcttgggtcagcttaacggccaatggccaacaaatttggcaaggttctgtcgcagttggtgccgaacaaactgctgaattacctgaaggcgttacgcaatttagtattcaaactgggaatgcacctgcaacgaagatgaagattaatggcaccgatattaaccttagtccaaataacgaagcaacgtttgtgcggacgattaatttcacagcaacattggctaaataaaggacattaaggagtcttcaacatgaatttaccaaataaattaacgatgtttcggattattttgattccgatttttactttgattttagtattggatgtgcctgcgacagccattatggtcgctgggacaagtattccagtcagtgcgattattgcaacagtgattttcattgtagcctctttgacggacttactggacggcaagattgcccgatcacaacatttggtgaccaacttcggtaagtttgctgatccattggctgataaattattagtgatgacagcatttatcttcttagtggcgctagatcaagcgccagcatgggtggttgcgattattatttggcgtgaattagccgttactggcctacgtttattattaagcgaaggtggcgaagtgatggccgcagctatgccaggtaagattaagacgacgacgcagatgttagcgattattctattgctactcaacaacgtcttctttaacaatatcggcattccaatggcacagatcatgttatacgtttgcttgttctttacagtttattcgggtaccgattatttcatcaagaacagaggcgtctttaaagactcattttctaaataaacttaaactggcggggaatcccacgccagtttttttaacccaaaaagcacgaaaaaaacgcggtgattcgggtatagtagagtagcttaaaaaatatatagaacgtttgttcgatttttacttgcttttatttcgtgaaatcggtaaactaagagagtactgaaaaggactcttttgaggagggcacttaattggctaaagatgaaagacaagcagccttagatgctgcattaaagaaaattgaaaagaattttggtaagggctcaatcatgcgaatgggtgaaaaggttgatacacaagtctcaactgtttcatctggttcccttgcattggatgaagcgctcggtgtaggtgggtatccacgtggccgaatcgttgaaatttatggtcctgaaagttcaggtaaaacaaccgttgccttacatgctgttgccgaagtgcaaaagcaaggtgggactgctgcttatatcgatgctgaaaatgcaatggatcctaagtatgcaactgccctcggggttaatattgacgatttactcttgtcacaaccagatactggggaacaaggcttagaaatcgccgatgccttagtttcaagtggggctgttgatattttagttgtcgattcagtcgcagccttagtgcctcgtgctgaaatcgaaggcgaaatgggtgacgcgcatgttgggttacaagcccgcttgatgtcacaagccttacggaaattatcaggaacaatcaataaaacaaagacgattgcgttattcattaaccaaatccgtgaaaaagtcggcgtgatgttcgggaaccccgaagtcacacctggtggtcgcgcattgaaattctattcaaccgttcggcttgaagtccggcgtgctgaaaccatcaagaatgggaccgatatgatcgggaaccgtgcgcggattaaagtggttaagaataaggtggcaccaccatttaaagtggctgaagtcgacattatgtatggtcaagggatctcacaaacgggtgaactggtcgacatggcggtcgaaaaggacattattaataagagtgggtcatggtattcctatggggatgaacgcattggtcaaggacgtgagaacgcgaagaattacttggctgatcatccagaagttcaagatgaagtccggcttaaagttcgggaagcatatggtatttcggatgtcccagtagatgaaagcgatgaaacacaactcgacgtctttacggatgacgattcaaacgaataagaatcattaagctgaggcaaaagttattttgcttcagcttttttgattgcttaaccgaattattctgatggtcgatttgattgactgaactcgaaaacggttgcaatgccgatagtttaagttgacaggcggtttatgaaactataaaataactatgtgttgaaaaactaaacataataacatctttaaaaatttgcagtgaaagttgcaattcaaaatttttgatgatgcggaggtgaaacaatgaacttagcttttccattaatcctcgcagtcatcatgttaatcgttggtttactagttggttccgttctacaaaagaaggcgcacgaacgtgaaattgatggtgcaaataagactgccacaggaataatcgcagcagctgaaaaagaagccgcaacgcggaagaaagaaattcttttggaagcaagggatgaaaatcaccgctatcgttctgagattgaaaatgaattgaaagatcgacgcagtgaggtacaaaagcaagaaaaccgtttgattcaacgggaagaaacaatggatcgcaaagatgcaacgttggataaaaaagaacgttcattggagcaacgtgaaaatcgtttaacgaatcaagcacaagagctaactgaaaagcaggcagaagctgccactttagttgagcaacaaaaagcgaagttgcaagaaattgccgaattatcgcatgatgaagcgcaaaaaatcattttggatgaaacgaaacaagaccttgaacatgaacgggctgttttaatcaaagaaagtgaagaaacagctaaagaacaagctgatcggactgcgcgtacattagttgctgaagctattcaacgcagtgcagcggatatggttgctgaaacaacagtaactgttgtgacgttaccaaatgatgatatgaagggccggattattggtcgtgaaggtcggaatatccggacattggaaacactgactgggattgacctgattatcgatgatacgccagaagcagttgtgcttagtgggtttgatccgattcgtcgcgaaattgcgcgcatgacattagagaagttaattcaagatggccggattcatccagctcggattgaagaaatggttgataagtcacgcaaggaaatggacgaacaaatcagacaaatcggtgaacaagcaatctttgatgttggtgtgcacacaatgcatcctgatttaatcaagattcttggtcgattacatttcagaacaagttacgggcaaaacgtcttgaatcattcaattgaagtggccaagttaacggggattttagccgctgaattgggtgaagatgtgacactcgctaaacgagctggcttgttacacgatatcggtaaggccctcgaccatgaagtcgatggctcccacgttgaaattggggttgaactagcaacgcgttataaggaaccggcaacggtgattaacgcaattggttcacaccatggtgatactgaagcaacatcgattatctcagtcttagtcgcagctgctgacgcgatttcagcggctcggccgggtgcacgttctgaatcacttgaaaactacattcaccgtcttgaaaaacttgaaagtattacgaatagttttaaaggtgttgatcatagttttgcgattcaagcgggtcgtgaagttcgggtgattgttaaaccagaacaagtcacagatgaccaagcaaccgtcttagcacgtgatgtgaagaatcaaattgagaaccaactcgagtatcctggccacattaaggtgactgtgattcgcgaaacaagaacggtcgaatacgcgaagtaatgcggattggcctaacattgaagcgggggacaaaaccaattttgttccccgctctttttttggttttaattaaaattgtggaggacattatcatgaaagaaggtgtgttattagttaatttggggaccccagataaaccagaagtcaaagaaattcgccattttttaaaacatttcttagctgatcagcgggtcgttgcgatgcccaaagcggtttggctccccattaaaagtgtacatgcaacagcaagttgctcaattacaagctgaattacccgattatcaagtttttgaggcgatgtcatatagtcaaccattcttaaccgatgtgcttagtgagattcaaacggcgggaatcgatgatttgacggtcgtgccaatgtatccgcaatattcaacgactacgacgatgtcggtttatgatgtagttgcgcagttttatttaaaacaatcaaacatgccaactttgcattttgtgaaggacttttatcaacgctcaggctatatcgacttgatggcaacggcgattgaacagaagctacagacgcaaacctatgacgaaattattttgtcataccatgggattccaaagtcgtacgtaacaaaaggggatccgtaccaagcacagtgtgaagcaactactgcgctattgcaggcgcgcttgcctaaacaaacttttcggaccacataccaatctaagtttggaccgaatgaatggctaacaccggccactagcactacgatgcagtcattagcccaagaaggcgttagaaaaattttggtcctaaccccgggctttgttgcggattgtttggaaactatcgaagagattgatgttgaaaatcgggactattttatggataatcaaggcgaacaatttgattacattcatccctttaatgctgatccacgatttacggccttattagcccagattgtgcgggacagataatcagggtgcttggcttttgcttaagaaatcaagtcattgttgtgtttaacgggtttgatttgtataataaagagaatgcaagagaaagtaggcaagttgaatgcaacccatgtttaaaattatagttggtctatttgcgacgatgctcgtatcggccgcaattaccccattagtgcgccgcctcgcgtttgttttaggcgcagttgataaaccaaatgcccgccgagtgaataaaaaggcgatgccggcaatgggtggtctggccatttttatcgcgtttacgtttgggaccttcgtattattacgcgggcaattccaaacacacgaacttttcagtatcttcttagcagaatgtatcatcatcatcactgggatgatcgatgatattaaggaattgaatccaaaggaaaagatgctcggtattttattagcagcattggtcatttatttcttagcgggcgtccgcatgaatattttgacaattccatttttaggcacctttgaactaggatggttaagcttcccaatcaccattttttggattctggcaattaccaacgccgttaatctgattgatgggttggatggcttagcaactggcgtttcgattatcgcactcttcacaatgggcgtcatcgcctatttcttcttatcaatcaccaatgtcagcgtctcaatcatgattttttgtttggtcgctgcattaatcggtttcttaccacataacttccatccagcgaagattttcttgggggataccggggccttattcattggttttatgattgcggtcttatcgctcaaaggtttaaaaaacgtgacgttcattacgttattgattccagttattattctcggtgtaccaattacggatacaatttacgcaatgttgcgccgaattttgaataaaaagcccatttcacaagcagataaacatcatttacaccatcgtttgatgcaacttggtttatcacatcgccaaacggttctcgtgatttatggactggcattggtcttctcgttgatttcattgctctatccactatcgacactctggggaagcttggcattgacggtagccgtcttaattggcttagaattatttgttgaatcaattgggttacttggtgacaatcgccgcccattattgatgcttttaaaacgattattaaaaccgaagaatgaagaaaaggattagccattggctaatccttttcttgcgttattggtagcgaatctggtgtaaatcctgtgcgctaatggggacttcgttgaattgttgagggccaaggtcgaattgtaattggccgttgaggcgttcggttaattgttgttgtaaatcactaactgctgtagtcgctaaccagacggtcatttgaatgttagtcgtatattggatgtcttcggcagtgaggtttaattggctaagtaaattttgcacagtgtcaaattgagcgtagtcaattgtaatctgacaagcggtttgttcgataccttggacaataccgaggtgttcaagtccggccgaagtggcgtgactgtatgctcgaataagaccaccagtaccaagtttgatgccaccaaaatagcgggtgacaacgacacacagattagtgagctgcatctggcgcagtacttctaacattggcacgccggctgtgccacttggctcgccatcgtcactttgtttttgaatattggccgttaaacctaattggtaggcgaaacaattatgattggccttcagatttgctttgcgaacttgtgcgatgaacgcttgtgctgcggtttcgtctgtaacacgcgcaacatgacagatgaagcgtgactttttgatttcgagttcaaattcgccgtctttttgaacggtaaaataactttgcataccggactccttgaaaaaataagctggatttaacggaactaagggtggaaggtgaaatgatggcaaaacaacttgcttatggtcgtcagtggagtgccacccaattgagtaccgttatgaataattatagtttaccacagattaaacagcgactagcgtttcaaatagttaatcagcgtctggtatgtcaacggtgtggacaagtggtgaaagagcaagctcgcttacctgatggtcggtattattgtgctgcttgcttgacctttgggcggttagtggaaggggatcagttggtttacgtgcctgaatgcaatctgtttgagtcgatcgtagaaccgctaacttggtcggggacactaaccccttttcaagcacaagccgcaaagcagattgttgcggtcattaccaagcaacaacgccatgtcttaactgcagtgaccggtgctggtaaaactgagatgttatttcaaggcattgcgacggctttagctaatgggcagcgtgtgtgtgttgctgcgccgcgggtggcggtttgtttagaactctatccgcgcttgcaagcagcgtttgctaacacaccaatcatgctgatgcatggggaacagactgcgccttaccggtatacgccgttagttgtttgtacaacccatcagttatttaagttttatcaggcatttgacactgtcattgtcgatgaggttgatgcgttcccatttgtcaataatccccagcttgagatggctgttaaacaggcgtgtaagccatgctgtgcattgatctatctgacggcgacaccaactgtaaagttgcgccatgcgattaatacaggggatttaacgggtagtgagctaccaattcgctttcatggtcacttattacctgaaccgcattgctatcccttgtttacgtggcggcgttcagttaaacggcatcagttaccatccgtgatgcgcaacttactcaggaagtgtcttcaagaacaacgcttattattatttgtgccacaggtaagggatttagaggcggttcagcagagcgttgttcgggcattgccacacattacagtgaacacggtacatgctggcgatcctaatcaattagacaagatagcggcctttagagcaggatgcggggacgtgctgattacgacgacagttctagaacgaggcgtaacgtttaaaaatattgcagtgtttgttcttggtgcagaacacgtggtcttcactgaatcagtgcttgtacagattgctggccgagccggacgacagcaagagcatgctgccaatccggtttattttttctacgcggattacacggtcgctattcagcgtgcgtgtcaacaaattaaacgacaaaatcgaaaaggacggcgattacaatccactgtttaatgtgtgcggcagttatccttgaacaaccctccattgcattgatttgttcattgcgaccagtctatccggcgatgatctgttcacgttgcatggcacagtttgaacggattgggccgcagtgttgttcgggatgtggtcggcaaatgacaacccagggggtgtgtccggattgccagagatggcagcaactgtatccaggcgaacaatttactaatcgagcgttgttaacatacaacgaaccaatgcaacagtattttcaacgctataaggggcagggggattatcgattacgtcacgtatttcaacggctgattcgagaaaattttcctgtgcaacggcaaacggcgtatatcccagtcccgactgatccaacacatttgcaaagccgcggattcaatccggtggttggcttatacgaggactgttttccactgaccccattgttgcagaagctaccaactgaaaaaggacaagcacaaaaaaatcgtgcagagcgcttagcaacgccgcaattttttaaatgcgcgcagaacgtgctgttgggttccaaggtgcagcagttaattttgttggatgatatttataccactgggcgcacgttatggcatgctcagcagtgtctccgcaagcgataccaaacgctgccaattcacgcaattactttagtccactaggaccatattatttgtgtgttacgcgcaaattatatataatgaagtcagtaacaaagcctcgggaaagaattgagttccgagcgacaagtgcccacagggggtatttgtgaaaggggagaattcatatgctaagttttaatgttcgtggtgaaaatattgaggtaactgacgcaattcggagttatgttgaaaagaaaatcagcaaactcgaaaaatatttcgatgattcagcgaccgcaactgcacacgttaatttaaaagtgtactccgataaaaccgctaaggtggaagtcaccattccattaccataccttgtattaagagcagaagaaacatcgcctgatatgtatggtagcgtcgacctagttactgataaattagaaagacaaattcgtaaatttaaaacaaagattaaccgtaaatcacgtgaacgcgggattaagggtatggaattaacggtgccagaagcagaagcattaccagaagaatcaatgcaagtcgttcgaacaaaacgcgtttcattgaaaccaatggatagtgaagaagcaatcttacaaatgaatatgctaggccatgagttcttcatcttcgaagattcagaaacaaacggtacaagcattgtttataaacgtcaagatggtcgttacggtttgattgaaactgatgaataagtgaacgttaagttagggctgggacaacgatgagttgcgctcagcccttttttgtagccatatagataatggggttaaatttttactgaattggctggattgtttactgtgacagggttttatttgattgtaataaatggtaaaatgaattgttagtaatcatattgactatataagaaatcgctatttaagaactcaaacgtatttctagaggagaattgacgcacatggcaaactttctaaaaacatgggtagaaagcgataaacgtgaagtagcgcgaatgggcaaaattgccgatcaagttcaaagctatgaagatgaatatagtaatttatctgatgaagcgttgcaagctaagaccccagaattcaaaacaagattagcaaatggtgaaacattagacgatattttaccagaagcttttgcggttgcgcgtgaaggtgctaaacgtgttttagggttattcccgttccgagtacaaattattggtgggattacgctacacgaaggtaacatcgctgaaatgaaaactggtgaagggaaaaccttaacggctaccatgcctgtttatttaaatgcattggctggtaaaggcgttcacgttgttaccgtcaacgaatacctttcaagtcgtgatgcaacggaaatgggtgaattatataactggctcggtctttctgttgggttaaacttaaatgctaagacaccagaagaaaaacgcgacgcatacaactcagatatcacttattcaacgaatagtgaacttgggtttgattacttgcgcgataacatggtggtttacaaagaagaaatggttcaacgaccattgaactttgccattgtcgatgaagtggattcaattttaattgatgaagcgcggacaccattgattatttctggtcaagctgaaaagtcaacagcactttatatccgtgctgatcgttttgttaaaactctaaaagaagaaactgactataagattgattggccaacaaagaccatcagtctaacagaatcagggattgaaaaagctgaggctaacttcggcttggacaatttatatgacactgaaaatacagccttgacgcatcatttggacgaatcattacgggccaactatatcatgttaaaagacattgattatgtggttcaagaaggcgaagtcctaattgttgaccaatttacaggtcgtgtgatggatggtcgtcgttattcagatggattacatcaagcgattgaagccaaagaaggcgttgaaatccaagatgaaaccaaaacaatggcgaatatcacataccaaaattattttagaatgtacaacaagttatcagggatgactgggacggcgaagaccgaagaagaagaattccgcgaaatttacaacatggaagttatctcaattccaactaaccgcccaattgcccgaatcgataaaccagatgtgctttatccaactttggaaagtaaatttaaggcggttattgaagatatcaaggaacgttatactaagggccaaccagtattggttgggaccgttgcggttgaatcttcagaattactatcgcgattactagatgaaaataacgtgccacacgctgttttgaatgctaagaatcactttaaagaagctgaaattatcatgaatgctggtcaacgtggtgcggtcactatcgctactaatatggctggtcgtgggactgatattaaattaggacctggtgtgacggatttaggcggtttggctgttattgggactgaacgtcatgaatcacgccggattgataaccaacttcgaggccgtgctggtcgtcaaggagatcctggtgtcacacaattctacatgtcattggaagatgacttgatgaaacgtttcggttcagaacggattaaagccttcctagaccgaatgaagatttcagatgacgatgcggtgatccaaagtaagatgattacgcgtcaagttgaagccgcacaaaaacgggttgaagggaataactacgatacacgtaaacaaacccttcaatacgatgatgtgatgcgtgaacaacgtgaagtcatctataaacaacggatgcaggtcatcatggcagaagataatttgaaagaagttatcatgccaatgatttcaagaaccgttaaacggattgtgcaattgcatacacaaggtgaaatggggagctgggaattagaagcaatccacgcatttgccacagcttcaatggtcagtgaagaagaattaccaattgaaaaattacaaggtaagactgctgaagaaatcgaatcattattgatgacctttgcagaaaagaattacgcaacaaaacaaaaacaattagcagatgcagatcaaatgctcgaattcgaaaaagtcgttatcctccgtgtggtagatgaacgctggaccgatcatatcgatgcaatggatcaattacgcaactcaatcggattacggggctacggtcaaatgaatccattggttgaatatcaagaagaaggttaccggatgtttgaagaaatgatcagcgacatcgattacgatacaacccggctcttcatgaaggcggaaatccgtcaaaatattcgacgctaacgcgtagaaaatggctgaggtagttaacttagccattttttaatgggaaaaaatagtggagggactaaaatatggaattaagtgaagcaaaacatcttttagaagcaattgaagctaaaataacgcaatttagggggtcactttgacttagatggcctgcaagaaagcatcgcgcaaaatgaagcgcaaatggcggatcccgatttctggtcggatcaaaaagcagcccaacagttaattgatcaaaataacgccataaaggaaaaatacgactcttttatgcaacttcaagcgcaatcagaagagctacaagtgacattagagctattacaagaagaacccgatgctgaactccagacgagttttgaagctgatttgacggctgttcaagctcagatgcaacaatatgaactcggacaattactatcgggcgactacgatagcaataacgcgattgttgaattgcatcctggtgctggtggtacggaatctcaggattggggttcaatgcttttgcggatgtacttacgctgggcagatgcacacggctttaccgttgaaacagaagattaccaggccggtgaagaagctgggattaagagtgtgaccttgatgattaaagggcacaacgcgtatggcatgttacgttctgaaaaaggggtccatcggcttgtacgaatttcaccgtttgattcagctgggcgccgccacacctcgttttgttcagtcgatgtgatgccggaattggatgattcgattgatatcgaagtccgcaccgaagacttacgaattgacgtcttccgttcaagcggggctggtgggcaacatatcaataaaacatcatcagccgtgcggttaacgcatttaccaactgggattgttgtttcatcacaggcgcaacggtcgcaattgcaaaaccgcgaaactgcgatgaatatgttgaaggctaaattgtatcaaaaagaacaagaagaacaggcgaaaaaagcggctgctattaagggcgaacagcttgaaattggctggggctcacagattcgctcatacgtattccatccgtacacgatggttaaagaccaccggaccgactacgaaaccggaaacgggcaagcagtcatggatggcgatttggatccatttatgtatgcctatctgcaatggcagttgagtcagaagaatcccgactagctgcaaagaaattgaaatataaatgtaatcaaattgtgattatttgaataaatagcatgctataatataaaagattgcggttttcattgacaataaataatgataacgacaaaaaaaggagtgtccccaattgattcgaatgacaaatgtgtcaaaaaagtatccaaatggcgtgacagcaattaaggatctttcgctaacgattgaaccctgcgaatttgcttatattgttggtcccagtggtgctggtaaatcaacattcattaagatgttgtaccatcaattaaaagcaacgagtggtgaaatcgaagtcgctggttttgatttaatcggtatgaaggatcacgatgtcccatacttacgccgtaagatgggtgttgttttccaagatttcaagttattaccacgtttaacggtgtttgaaaacgtggcatacgccatggaagtgatcgaggcagaacctcaagcaatcaaagatcgtgtattagaagtgctcgaactagttggcttgaagggtgaaattcgtcgctttccaaatgaactttctggtggggaacaacaacgggtcgcggttgcacgtgcgattgtgaaccggccagatgtgttgattgccgatgaaccaacggggaatctagatcctgaaacgtcagatggtattatggatattttagaagcaattaatgaacgtgggacgattgtcttaatggcaacccataacaaacaaatggtgaacgaacggacccatcgtgtcttagcgattgaagacggtcgcttagttcgtgatgaaaaagaaggtgactacggctatgaagattagaacattgaagcgtcatctcaacgatagttttaagagtttaaaacgaaatggctggatgtcaatcgcagctgttagtgcagttaccgtaacgttgttattagtcgggattttctttgcgatgatcttcaactttaacaagatttcacaagatattgaaaatgatgtgcacgtgcgggttatgattgaacggggcacaacaagtaaacaaaaagatcagctacaaaagaaacttgaaaaaatggcgtctgttaaagaagtgacgtattcaagtcgtaaaaaggaattaaacaaggttgtcggcagttacggtcaatcatttaagatgtttaccggagacgataatccgttgtacgatgtttacacagtaagtacgacaaaaccaagtcaaacgattaaagtcgctaaacaagcgaaaaaattgaaatacgtttatgatgccacttatggtgggaacaacgctaagaagttgttcaaggtaatgagtagcgtccgtaaatggggcgttggttttactttattattgctctttgtggcagtgttcttgatttccaatacaattcggattacgattttatcgcggcgcgacgaaatcggaattatgcgtttagttggggcaactaacgcgtatattcgctggccattcctttttgaaggggcttgggttggattacttggggtaattattcccattattgtaatcgacttaggttatggttgggtttaccgtcatatggcactcagcatggcttcagccggttattcaatgttgaaaccaggaattttcttattccaacttgatttaacaatggctgtgattgggattgtgattggggcattaggttctgtcatctcaatgcgtcgtttccttaaaatttaaactaaattagtgaaagagtggcgaacattaaattgttcgtcactctttttttttgaaccctaggcagttaagggggcaaaatgctatactgattgggataactgcgaaattcggcagctggaaatcgagcgtgtgtcgttggaaacacgcacggtatttaaatatagacgctgggggtttgttgaattgacgatgatcattgatattttgcgaccattactaacggtaccacttttatggttagcgattgtgtatgctggctggttagcgcatagacgaattagcttggaacggaagacctttagaattgcgattaatccacgatggatagaagtgggccattttgtgggccatgggctactcgcagggctagccttaagttgctgtaccttagtgttaggggcgatggttaatatgcaatggtggctggtctatcaactaatcgctattttgagtttgctagtggctgctagatggcaaaacgtatcggcaacctttttaatcagtgctttggtctacgctggtgcaacattcatatggccccaatatcagatggaaggtcaagcaagtcttttggctgaattattggtgattattgggttagtgaccgtcatcaatagtgttttacaacgttgggatgccgaggcaactgtgacaccgcgtgtgatgactagcaagcgagggcggttgacggccttctttatgagtcgacaaatttatattgcgccggtctttttcttagtgccaggggcaattgatatgccaagtttgggtttttggccggtcttaaatatcgggcatcaatcatatagcttggtaatcttgccattgttattgggatttagtttgaaagcagtcaaaggcttaatgaaatcagttgttactaaaaatgccaatagctatttgatctttggcttgttgttagttgggtttgggttaattgccgttgcatttccgaactggattattggcatgttaacagttgcgctagtactaagctgtgcattacaatggcggttgagtagacgcagtgcccatgaacggcagttgcactttacgaaaccctacgatggcgtctttatcttagggattttacgcgaaacgccggctgctaaaatggggttggtcgttggcgatacaattgttgaatgtaatggcgaggctgtctcaaataacgataatttttatcgggcgattcaaagtcagccaacgtattgccatttaaaggttcaagatttaaacggtgagttccggatggctgaaggcgcaatttttgctgatgcaccacatgagttaggcgttgtattattcccagagaattaagtaaataaagggtggcatgaatgaagacaattttagtggtagacgatgaaccagcaatcttgacattattacgctataacctggaacaagaacattttaaagtgatgacggcaactgacggtgcacaagcgctgacgatggctttacagcagtcgtttgattttattattttagatttaatgttgcctaagctagacggaattaccgttaccaagaagattcgggaggcaaagttaaaaacgccgattatgattctaacggctaaggatagcgaaaccgataaaattgtcggcctcgaagtggggggagacgactatgtcactaaaccatttagtccacgcgaaattatcgcgcggattcgggcaattgaacggcggacggcacagcctgtagcagtcgttgaaacgcaccctagtgatattttacaagtaggggacttaatggtcgatgaaggcgaagttgtggctaaaaagggcactcagaagctccatttaacgcctaaggagttcgaactccttgtttactttatgcatcggattaacaaggttcaaagccgtgagaaactcttaaatgcggtgtggggctttgattatccagccgaaacgcgaatggttgatattcaagtcagtcatttacgggaaaaaatcgaaacagatccgcgtcatccagtttacttaaaaacggtgcgtggtttcggttatcaattggaggaccccaaccatgaccaaacatgatcaatttagattttatcagctagccactattttagtggctgtttacataggttttattgtgcttgtcaatttggtgattgcccaacaacaagacgcgatgttaaaggaacggggcgccgactatgcgctaatcatcaaacaaccacagtttgatcggcaaaagtggttacgccaaaacggcttacaagttttgacgccaaaatcgccgaataaaacaaagttgcaaaaagcagtgacggatattgtcaatcggaatcattctgccgccaattttagtacgcggcaaacagttaataagcaaccgtatttgttttacgcacaccaagcagatcggcccaactttgtcttagtagtgcctcagcaacagttctggcatacgtggccgaagattgctttatcggtcacgattgtctatttaatcggtagctggatttttctataccgtttctggcggcaacgccgtcatttctttgaccacttgaaaattttagtcgctaatattcatcatattcggcatgaagaagtgcccgaaccgattatttttcaaaaagatgcgtcattatatatcctcgcgcaagaaattaataaattaaatggtgatatgcggcatatgcggcagaagattgccatgcaacagggcagttttgaccgcctaattgaccatttaccggtcggcgtcatggtgattaacgaaaatcgtgaagtcgttttgcacaatgaagcaatggatcggttattggagacgacgattgttactgagaaacacccctatattgatgatatcaagacgtatgaattaacacggatgattgagcacacttttaggtaccgaaagagtcatcaccaagaaattcagttgattcaaaatcaagaacggtttgtggatgcgaatgttgtccaactcaatacggttaaatcgaaattccaagcattagtcattttatatgatttaaccgatgtccggcgcgttgagcagatgcagttggattttgtcagcaatgtgagtcatgaattgaagacgccggtgacggctattacaggctttgctgagacgttgttagctggtgcggcggaagatcctgccacgcaaaagcaattcttacaaatcatctatgacgaaagtacgcgattaactgcgctgattcaagatattttagcgctttcgcatctagatcgtaaggaccaatcgcaagagcaacttgtgaatgtacgtgaattggtgcaggctaatctcgaactgatgcaacaaaaggcacaacaaaagcagttacacgtctccgttgatattccaacggatttagcgattagaattcagaaaatgaagtttaatcaaatcttgaaaaacctaatcgctaacgccatcacgtataataaacaaaacggctcgttggtgattgccgtgcaacttgaaaaagatcaaattgttatccgcgttgtcgataccggtttgggcattccaagtgacctacaagaaagaatttttgaacgattctatcgggttgatcaagcgcgcgcgacccataagagcgggaccggccttggactagcaattgctagcgagattaccgccagtttagaggggcagttgaccgtaaagagtcaattaggtgtcggtagtgaattcattttgaagctaccaaacgcttgatttacacaaaatttacatttgataggcttagtttttacaaaccttttttataatggaacttacgaggtttaaatggaattcgtggaggattaacatgcgcaaacgtaatgttattggcttattagtcacattcagtttattactattggctggttgccagtctaaacaaaatggtcagtccgtaacggcggtcggctcatcagcccttcagccgctgattgaagcgttagctgaacaatacagtgctgatcacagcggtcagttcattaacgtccaggggggcggttctgggactggcttgagtcagattcaatctggcgctgtacagatggggaattctgatttatttgctgaagaaaaggctggcattaaagcggacaagctggtcgatcatcgcgtggctgttgtcggcattaccccagtcattaataagcaattagggattaaaaacttaacattgacgcaactcgcgaagatttttagtggcgaaattgataactggcaagacgttggtggaccagatcagccggttgttttagtaaaccgagcccaaggtagtgggacgcggacgacgtttgaacaatgggtgatgaagtcgcgcaagactaaacccgctcaagaacaagattcaacggggatggtgcgatcaattgtagcgaacacgccaggggccatcagttatcttgctttttcatacgtagatgattcgattgcaatggttaaattaaacggcattgcaccaaccgatgaaaacgtgatgactaatgcatggccaatctggtcatatgaacatgtttacaccaaggggcaaccaactgggttaacaaaacgtttcttggcgtatgtcttatcagatgaggttcaacataaacaagtcggcaagatgggctatattccagttgctaagatgacggttgaacggtcggttgatggcacaattacaaaggttaagtagggggccaattatggatccaattaaagcaagtttacttaagaaatcacgcgcagccaaaagtgaaacacggggcaaattaatcagtttattctgtattagtttaatcgtgttcatcgtgctcgccattttctacttcgtcgcttcaaaagggttagcgaccttctttaaagataaaatcaatctaggccgctttttaacgcagtctaattggaatccaagtttgaaagatagtcatggtcgaccagaagtgggcgccttaccaatgattatggggtcatttggagtgactttcttagcggctttattagcaacaccgtttgcaattggcgctgggatttttatgactgaaatctcacctaagcggggtgaaaaattattgcaaccagtgatggaattgctcgttgggattccatcagttgtttacgggtttatcggattatccgtgattgtaccagctgtccgtcatttgtttggtggcagtggctttgggattcttgccgggacttgtgttttgttcgtcatgattctaccaactgtgacatcgatgacagtcgatgcactcaagagtgtgccacggcattatcgcgaagcctcactcgccttaggtgcaacgcgttggcaaacaacatggaaagtcgttttaaaagcagccacaccagggattttaaccggggttgttttcgggatggcccgggcgtttggtgaagcattggccgtccaaatggtcatcgggaacgctgcgttattaccacataacttaattaccccagcctcaacgttaacgagtgtgttaacgatgggcattgggaatacggtcatgggttcattagccaataatgcactttggtcattggcgttactcttattattgatgtcactactatttaacttattagttcgtttaattggtcggaagggagcaataggtcgctaatggatgcaaaaaaatgggataaagttgccaccggtgtgctaaccctcatcgctggtttgatcgtattattattagcaagtttgctcggctatatcttggtgcgcggattaccacacgtgacgtggcagtttttaacgaaacctgcgcaaacctttactaaaggtggcgggattggcgtccaactgtttaattcattctatctattaattttggcgatggtgatttcagtaccgttatcaattggtgccggcatctatctcgcagaatatgcgccgaagaactgggtgacgaatgttgttcggaccgcgattgaagtgttaagttccttaccatccgtcgtggtcgggttattcggtttcttggtctttgttatccagtttaagctaggcttttcaatcttagcgggtgctttagccttgaccgttttcaatttaccgttgttaacgcggaatgtggaagatgctttaaaatcaattcacttcacacaacgtgaagcaggtcttgcacttggtttatcgcgttatgaaacggttaagcatgtcgtgattccagaagcgttacccaacattattaccgggatgattttaggcgccggccgggtctttggtgaagcggctgccttgatttatacagctggacaaagtgccccatcacttgattttaccaactggaacccaatgtacatcgcgagtccgttgaatccattgcgacctgcggaaacattagcggtgcacatttggaagattaactcggaagggattatgccggatgcgactgcggtttctgctggcgcatctgccgtcttaatcatcgccgttttactatttaactggttagcacgggtcatcggcaagcgtgtctaccgtaaaatgacagcagcataggagaaaataatggcagattacgatttaacaaaaacgcacatcaaacatttagatgaaccaaaacatgaaattgccttatcaactgaagatttaaacgtctattacggcgacaaacgcgcgatgcacgatgcatcattgcaatttgaacgctatcgaattaccgcgttaatcggcgcttctggttcaggaaagtcaacctatcttcggagtttaaaccggatgaatgacaatattgctaatacacgtgtgaccggtaagattatgtaccggggcttgaacatcaatagcgatgacgttgatgtgtataagatgcgggaacatatcggcatggtgttccaacggcctaatccatttgccaaatcaatctatgacaacatcacttttgccttgaaacaacatggacaaaaagacaaaaagtatctggatgaagtggttgaaacgtcactaaaacaagctgctttgtgggatcaagtcaaagattcattaggaaagagcgcattggcactatctggtgggcaacaacaacggttatgtattgcccgggcaattgcgatgaaacccgatattttattattggacgaaccggcttcagctcttgatccaatttcaacgaacacggttgaagaaacattgattcgcttaaaagaagaatttacaatcatcattgtgacgcataacatgcaacaagcagcacgaatcagtgattacacggcctttttccattcagggcacgcacttgaattcgacgaaacacgtaaaatgtttacccggccgaagattaaagcggccgaagattatgtttctggtcactttggctaggacgcaaggaggtttgccccgtggcaaataagattattgaatcctcagatgtgcatctattctatggtaagaatgaggccttaaaagggattaatatggattttgttgaaaatgaaattacggcgctcatcgggccatctggttgtgggaaatcaacctacttgcgctgcttgaatcgaatgaatgatttaatcgactcggcgaaggtgaccggtaaattcttattgaatggccaagatatttatgcgcctgagatggataccgttaagttacggaaagaagttggcatggtgttccaacaaccgaacccattcccattttcaatctatgacaatgttgtttacggcttacgtttatccggtgttaaagatcatcgcgtcttagatgaagccgttgaaagtagtttgaaacaagcggccgtttgggacgacgtcaaagataagttacacgaaagtgctttatcactttctggtggtcaacaacagcgggtttgtatcgctcgggtgttagctgtgaaaccgaaagtgatcttaatggatgaaccgacttctgcgctagaccctatttcgagtgctaaaattgaaaatatgttgctagaattgcgccaacagtataccattataatggtgacgcataatatgcatcaggcttctcgtatttcggataagacagcattctttttacaaggtgaattgattgaatacgcaccaacgaagaagattttcttaaacccaaccgaaaaagaaacggaagattacatcagtggccgttttggctaagaaagaagggaaaccacaatgagacgactttttgaagatgagttaaatgatttacacgttcgcttctccgaaatggggatgatggtcaacgaagccatctataaatctgttaaagccttcattaatcacgataagcaactcgcacgcgaggtgattgctgacgatcataagattaatgaacgggaaacggatttggaacgtaagagttttgagttaatcgcacttcaacaaccggtctcaactgaccttcgcgtgattgtcacaatcatgaaggctagttcagatttagaacggatgggtgaccacgccgtttcaatcgcgaaatcaacgattcgggtcaagggtaatacccgtgtccctgatatcgaaaaagatattgcggatatggcagacaaagttaaacaaatggttgaagaggtattggacgcttacgtcaaagaagatcgtaagaaggccatcaaaattgccgatgaagatgttgcaatcaatgcttattcagacaatatttatgacgactgtatcaaagaaatgcaacgtgattcagaaaccgtcgttgggagcatggactacatgttagttgcaagctacctcgaacggattggcgattacgtgacaaacatctgtgaatggattgtctacctcagaaccggtaaggtagtggaattaaactccaatgcacaagaagatgaattctaaacaattcaattaaaaattttaaaaagcgatgacaaggtcgacttgctcgtcgcttttttagtgggagaatcataatgcaaaaacaaatatacttagctggcggttggtttacacctaaacaggcctcattagtggaacgcgcacacgcggctttaaaacaaaacccaacgattggttatattcatagtccacaggaacatcaatacaagggtgtgacagaagatcatgatccagaaggcatgttcggggggtacgaatgggccaaccaaacgtatcaaaacgacatcacagcaatggatttagcagacatggcagttgtgttatgggatatgcaagacgaagatactggaacggcgtttgaagtcggctacttgaatgcctgtcataaaccaatcgtctttgtttgtgaagatgatttacaagccaatcccatcaacctaatgttggctaaagggattacccaatgtctaaccagtgtggatgaattagcaacctttgatttccaatttgtcgccggcgaaccttacccaggacaaatcgtttaagcaaaaaagcgcaggacaaaaataattttgtcctgcgctttttttgttctcactcttgatacctaaataaaaatcaacctttggacctatgacaatcgactgtaaaatcggcataatagagtcatagtcaagtgaaacagtacaacgaatgatcaatggaggtcaaaacaatgaatgaacgtcaacgaattttagacttagtgaaccaaggtattttaacttcagaagaagcattagtcttattagaaaatttagccaaaaatgaccaagatgtaaaatcaaatccaactgaaacagcaacggagcaaactgaacaaccaaccgctgataaaagcgcaattgaagaaaaggcacacgaattaaccgttaacctttccggcgttaaccggcagttgcaagatttgaagcaagcaatgcacgctgatcaagaacaagtcactgtccttgatacgatggaagatttagatagtttaagcagtgaaaaagcaaccgaacggcaaacactcaaggctggcttattacaaaagcaagctgaagtcgacgagttggaagccaaacgcgaagcattgacggatgaactcaaccaaatcgaaaaagaacgccgccaaatgaccaaaaatcaatggtcagaaaaattaggcttatcagatgactggaaagaaaatgccagtgaaacatttgatgaattgagcgataagttaggcgaagctagcacacactttggtaagttcgtgaagaatactgccaaaacagtcatggataatgtggattggaaagaagtgaactttaaggtgcctggtttggcaactgaaaagttcagccatgaattcgtttattctgacgtaacaccagaaatgattaacgtcaaagtggctaacggtagtgtacatttccaaatctgggatcgtccagaagtcaaagtcgcagcgcaagtgaagttatatggtaaaatggcagaagcaacaccattggctgcttttgaagcgcgcagtacaattgatgtgactgatgccgacttggtcttccaagtgccgaataaacggattcaagcggacttaacgttctacttaccagccaataactacttacaaacgaatgtgaagttattgaacggggatgttgaattagatggctttaccggccgggatatttacttgaagacgactaacggtgaattaacgttaatcagcaccaacgctgcaatggtggaagctgaaaacgtcaacggtggcattacctttgatcaaggtcgttacgatgatttactcgcaacaacggtcaacgggaacctattgattcaagcgcaagttttaaatgcgagtgtttcaacggtcaacggggatatcaagaacactttgacgacaactgatttacaacatctaaaagcaaaatctgtgaatggcacaatcaagacagctttaccacaaactttggcaatgactgttgatgcccgcacgcgttttgggatgattaaaaatcggcttgcaaacacccaaaccatcgaacaacggcaaagtacggggaatcaaatgttacaacttggccgtaacgacaatgaacaggcagctcgtttaacattaagcacgacaactggtaatattttattgaaagacaacgataactaaaaaattaaggaatggtgggttttaacaatggggaaaagactttataaatcaagagataacaaaatgatttctggtgtgatgggcgggattgctgagtattttaatattgatgcgacattagttcgaattctatatgttgtattctcaatgttttcagcagcgttccctgggattgtggtctacatcatcttagcgatggtgattccagaacggccacgtcagagtaaacatgattctgaaagtgaatggagtgagttttaatgccttttttaatgattttattagtcattatcgccattatggcggcagttggcgtgtttagtctcgtgattggctcgctactgttattattaaaatttgcgctaccactgattgtgattgggttaattgtcagcttcatctaccgggcaattgctggcccaagtagacgtccacggcatgcagactggcgccatgactaccaagactattcttatcaagaaacagcacatcaaggtagccgtcaacgcaaggaagctcgtgatgtcaaagtagacgatgatgactggagtgatttctaatgcggtattggacacgcgtaattgttgatactttgttattcattgcgatttctggcttattgcccaatttattctatgttgaaaacatttggatcgcgttagtcgccagcattgtgttatcgattttaaacatctttattaaaccattgttgagcttactctcatttccaattacgtttttaacgttcggcttgtttagtgtcgtgatcaacgggattatgttagaattgaccgctgttttcgtcggcgcccactttagcttcacaagttttggagcagccgtgatcgtggcaatcatcttatcaattgccaatacgattattacaaatcaatttgtgagagagcgttattaaaaagttagcgggactgacgtcaattaagattgacattggtcccgttttttttgtttagataagaaaacgcctacattaaagttgaaaaatcaccttaaaagcaatatgatagaggatataagtgaaaatgaaggacgggtaactcatggctgatagtgtttcaattcaaaaactaatcaccgatttaaaattacaagtttatgccggtgaagcacatttaaaaaataaagcagtgacggtgagtgatatttcccgtccaggactcgaattaacgggctactttaattactacccttacgagcgggtgcaattatttggacggacggaagtttcatttacgcaaaatatgacaccagaagaacggttaatgattatgcgtcggatggcttctgaagatacgccctgtttcttggtctcgcgccaattagaaccaccaatggaaatgcttaaagcagctgaagaagcgggaattcctgtgttggggtcgaatttatcgacaacgcgtttgtcgagtttagtaaccgattatttggaaggaaagctagctgaacggcgctcaatgcatggtgtgttagtcgatatttacggtttaggtgttttaattactggcgattcaggtgttgggaagagcgaaacggcattggaattagtcaaacgaggtcatcggttaattgctgatgatcgggtcgacgtttatcaacaagatgaacaaaccgtggtcggtgaagcacctgcaattttgcgtcacttacttgaaattcgaggcatcgggattatcgatgtgatgaacctctttggtgctggtgcggtgcgggctgaaacgtcaatttcgttaattgtccacttgcaaaattggtcacaggataagaaatatgatcgcttagggtcagataccgaagaacaaatgattttcgacgtccctgtaccgaagattaccgtgcctgttaaagtcgggcggaacttagccatcattattgaagtggcggcaatgaacttccgggcaaaatcaatgggctatgatgcaacgaagaccttcgaagccaatctaggcaagttaattgaagccaattcagatgaagaagaatagttaaaagtcagaaaagttcgttaaatatggtaggtctaatgactagtttgagctatactgttagaaagacagtatgcaaactagtctttttttagagtgcgcagtaagccgggtatatcctgaggattaacacagaatggcgaaggattgcgtcagcaatcgtttgacattcagggggaaccggaaggatatggcttacggaacacgttttggataagagtgcattcaagcttgtccaacttttgcgcattagcacagtgaagcgataagcgacgcagtcgattgtttgcttcacgacgctaagcgcagaaatttagcttgaaaagtacgttttgatgaaagcacatttacaaaaggagcgaataatttgaatctactattaggcgcattaaatccgattgcattacgattgggcgcattggagatccactggtatggtgtgattatcgcaactggggtcgttttagccgttggattggcattacaggaagctaaacggcgcaatgtcagtgaagatgatattttaaatttaattttatgggcattaccatttgccttaattggggcccgactgtattacgtcgtttttgaatggtcgtattaccaagccaatcccggcgaaattattcagatttggcacggcgggatcgcgatttacggtggactgattgcagctgccattgtgttcattatctattgtcggcgtcatgcactatcgccttggttagtgttggatattgcggcaccaaccgtgatgatcgcacaagcaattggacgttggggcaactttatgaaccaagaagcctatggggcgccaacaacattgcactttctccaatcgttacacttacctgattgggtgatccaacagatgttaattgatggtgcgtatcgtcagccgacattcttatatgaatcagcatggaatgtattagggtttattatcatcatgagcattcgccatcgaactggttggtttaaacaaggcgaaatcttatttagctatttaatttggtattcgtttggccggttcttcattgaaggcatgcggactgatagtttattcatcggtccattgcgggtatcgcagattgtctcactcgtcttattctttggtgcaattggtctttggatttggcggcgtaagcacagtcagttaccggattatttaaccggcaatcaagcaaaagaacagaaatagggatttgtttaaaaggagaattatcagatgacagtaaaaattgcagttttaggggccggttcatgggggaccatcttagcaaacttattagtggaaaatggccaccaagttgagttgtggggcaatgatcctaaaaaagtcgctgaaataaatgaacagcataccaatacacattatttaccagattttaaaattgatccccagttacacgcaacgattgatcttaacgttgcacttgaccaagttgacgttgtcttgtttgtaattccaacacaagcgattcgtgcggtggcggaacagattgttcctgtgatgattgcgaaaaaagtgaaacccgtgattgtgacggcttcaaaagggcttgaacaaggcacgcacaaacggatttcagaagtcttgacagaagccattccagaaaccaaccgcaatgggattgttgttttatcgggtcctagtcatgctgaagatgtcgcacaaaaagatattactaccttaactgccgcatcaagtgacttgattcaagcccaatggatccaagagattttcatgaatgattatttccgcttatataccaaccctgatgtggttggtgttgagatgggagctgctttgaaaaacgtcattgcacttggcgcgggcgctttaaacgggcttggttatggagataatacgaaggccgccttgatgacgcgtggcttagctgaaatttcccgcttaggcgttgccatgggggctaacccattaacctttatcggattatccggtgttggggatttaatcgtgactgggaccagtgttcactcgagaaactggcgtgcgggaaatgcacttggtaaaggtcaaaaattagctgatgtgctagccaatatggggatggtcgtcgaaggggtcgcaacatgtaaagcagcctatgaattggctcaacaacgttctgttgatatgccaatcacacgggccatctataatgtattgtatgaagattgtgatattaagactgaaattgcgtatttaatgcggcgttcaggtaaacctgaaatcgattttgatgaagtctaaaactttttaacgaataaagcggcatcattttgaatgggtatcgcacccatcatcagagtgtgttatgatgattagcgttgagaaaaaggctaaaggagaaccgattactttatgggcgatttggtatctgtaagaccaacttgtgagttttattttgacagagggatgcaggcgtttgaacgatttcagtacacgcgcgcattaacgtgtttacaacgggcaaagtcgctggctaagaccaaagatgattacatctttgtggtgtgccaattagcgatttgtttggaatcggttggcgactatcatggtgcggcgaccgttctggaagaaattccaaccgccaactatcagagtcatcctgagttacaatattttttagcaacggcgtatgcctttttaaatcagacgcaggctagctatgaattagcgactgcttatttacagagtgacgattcggatttcgatgccgaagccactgaattattacaagaattgaaaccaacaagtccatcaaactggtaaaacagtttggtagacttttttttacataacgggtaagatacattctatgaagaacgagcactttttaaaagtaaggggataatagacatggctaaaagttatgatgtaattgtgattggcgcaggacctggtgggatgaccgctgctttatacgcctcacgtgcgaatttatctgtattgatgttggaccgcggaatttacgggggccaaatgaataatacagcagaggtcgaaaattatcccggctttaaatcaatccttggtcctgaactaggcgaaaagatgtatgccagcgccactcaatttggtgctgaatacggctatggtacggtcaactcgattgaactgcaaggcgagatgaagattgtgcacactgacgaaggcgatttcgaagcgcgttcaatcatcattgcaacgggttcagaacacaagaagattgggatccccggtgaagatgaattcggcggtcgtggtgtctcatactgtgcggtctgtgatggtgccttctttaagaataaagaagtcgtggtcattggtgggggcgattcagcgattgaagaaggcctctacttgacgcaattagccagcaaggtgacagtcattcatcgtcgtgatgaactacgcgctcaaaagattttacaagatcgtgcatttgctaacgacaagatggacttcatctggaatgcacaagtgacaactattgaaggtgacgacaagaaggtaaccggtgtcacttacattgataaggtaactggtgaaaccaaagaagttgctgcaagtggggtcttcatctatgtagggattgaaccaatgactagtgcctttggtgatctagggattctaacggatgccggttggattaaaacggatgaccacatggcaaccagtgttccaggtatctacgcaattggtgacgttcgtgaaaaagatcttcgtcaaattacaacagcagttggcgacggcggcatagcaggccaagaagtatttaaatacttacaaagtatctagagtgcgacggcagccggttagcttccgaggattaacacagaatggcgaaggattgcggtagcaatcgtttgacattcagggttaaccagaaaagacagttcgaggaagcacgattagagtgcgttcgaaacgattttatttttgaggattaacctaaaaatgtggcttatgacgcacatttccagcggtcgactaaattttagtcggccgtttttttattttgggaaaaattttaatttttagaaggacaagcattattaaataatcgacccagacaattagcttggtgcgcattaccgtacaaccgatgctttaggaaagcggttgattatggtatacttagaactagcttttagactaaaatgcgggggttacacaatgagctggcaagataattatgcaatttggaataatcaaacagaaatggatttacctttaaaaaaagcacttaacgaaatggcaaacgaccatgatgcattagaaaaagcatttagcgttccaatggaatttgggacagctgggatgcgtggtattttaggccctgggatcaactgcatgaatatttatacggtgcgtcaagccacagaaggcctcgctcaattcatggaaacattaccagaagcgactaaaaaacgcggtgtggctatcagttttgattcacgttatcaatctgaaacatttgcgcacgaagcagcgcgggtcttaggtcaacatcaaatcccaacgtttgtttttgatgccttacgcccaacacctgaattatcatttaccgtacggcacttacatacctatgccggtatcatgattacagcaagtcataatcctaaacaatacaatggttacaagatttatggcgaagacggcgcgcaaatgccacctaaggaatccgatttaatcacaagttatattcgcaaagtaaccgatttatttgcgattgaagtggctgatgaaagcacattgcgcgaagccggcttaatgactttgattggcgaaaatgtggatcaagcttacttagctgaagttaagcaagtcacgattaatcaagaattggtcgacacagtcggcaagaccatgtcattgatttacaccccacttcatgggaccgggaaagtacttggtgaacgcgcattgcgtcaagcaggctttgaacaatttacaatggtcgctgaacaagcagttgctgatccagaatttgcaacgacaccattccctaatccagaattcccacaaacattcgatatggcgattgagctcgggaaagcacaacaagctgacttgttgattgcgactgatccagatgctgaccgtttgggcgccgctgtgcgtcaaccagacgggagttaccaattgatgactgggaaccaaatcgcttctgttttattacgttatattttacaagctagtaaagatgctggcacattaccagccaatgcagcggctgttaagtcaatcgtgtcaacagaattggcaacgaagattgcagcgagctacaatgtgaagatgattgatgtcttaaccggcttcaaatttatcgctgaacaaattcaacactttgaagacacagacgaaaacaccttcatgtttggtttcgaagaaagctatggctacttagtgaaaccattcgttcgcgataaagatgcgattcaaacattggtcttattagcggaagttgcagcttattacaagtcaaacggtaagactttgtatgatggcattcaagaattatatgcggaatacggctacttcgctgaacaaacgactgcagttgatttcgaaggggtcaatggcccacaacaaatggctgacttgatggttaaatgtcgtgaagaaagcccagttgaatttgccggcatcaaagtcgcttcagcagaagacttccaaacacaaacagaaacttttgcggacggtcatactgaacccatcaatttaccaacatctaatgttctgaaatatcacttagaagatggcacttggattgcgattcgcccaagtgggactgaaccaaaagtgaaattctatgtggggacatccgctgatgatgccgcaacagctgatttgaagttagcaaacttcgaaaaagcaattcatgaacttgtaaaatagatagggcttctgttttacatttcaggataacttacctataataaagaacagcaaatagacggactactgcgttagtcggtctatttttgtaagaaaagggaggtagtttggtatgggtatgcatcaatatttgcaaggtttgaataatttggagacactaaatcgcgcaccaggattgtttaaatatcaagaacattccgttgcagcgcactcctttaaagtagcagaaattgcgcaattattaggcgatattgaagaagaaaatgggcaaacgattaattggcaagtgctgtacgaacgcgcactgaaccacgattatacggaacggtttatcggtgatattaaaacgccggtcaaatacgcaacgcatgaattgcggacgatgttggccaatgtcgaaagttcattaaccgctaacttcattaaaaatgaaattccagatttcttacaagaacggtatcaacgtcgtttgagtgaaggaaaagatgaaactttggaagggcaattattagccgttgccgataagattgatttactctacgagtcttttggtgaaattgaaaaaggtaatcctgagaatgcttttctagaaatttttgcggaaagtttaaaaacgattatgcaataccaaaatctcgcatgcgcccgttatttcatccaagaaatcttgccagatttactgagtgaagacttcgcagatcgagggaagctaacccaattagtgagacagacgctagcggaatagagtgccgttgtcagtcgctcagattcagagcatttgcctaacttggcgaattgacgctataagcggcgatttgacaagtgtagcaaagcgcaggaatctactgacaacagcacgtttccacactttagttgaaacgtgctttcattaagcatccttttccggttagctacaccagccgcatcatcgactgcgtcgctaatccgtctggttaggctaatcctcaaaggataaccgcttaatgacgcactctttaatcagcactctggcgaaagtatgttcggtgtggtagaatagtgaatgacttaaaggacaaggaatattattctttataaaatcggtaagtagacgttatggtggagggcaacttctacccggcgtcttcttttatcgctagcaaatggtaatggaggcttttgatgattgaacgacagaatgataaccaatttgatttagtggcgccctatgaaccagctggggaccaaccagcggcaattgaaacgttaactaagaacttcgaggcgggtgcaaaagcacaagtcttgatgggggcgactgggaccgggaagacctttacgatgtcgaacgtcatcaagaatttaaacaaaccaacattgatcatttcgcataataagactttggcaggccagctctatgccgagtttaagcaatttttcccgaataacgcggtagaatattttgtcagttactacgattattaccaaccagaagcttatgtgccttcaagtgatacctacatcgaaaaagattcgagtattaacgacgaaatcgacaaactacggcattcagcaaccagtgcgctgttggaacgcaacgatgtgattgtggttgcgtcggtttcatgtattttcggcttaggtgatccgaatgaatatcaagatcacgtcctttcgttacggccagggatggagattgagcgcaatgacttattgcgtcaattggtggatattcaatttgaacggaacgacattgatttccaacggggccgtttccgcgtccgtggtgacgtggtcgagattttcccggcttcacgtgatgatcatgcgttgcgggttgaattcttcggcgatgagattgatcgaatcgttgaagttgacgcgctaaccggtgaagtcattggtgaacgcgaacatgttgcgattttcccagcaacgcatttcatgactagtgaagaaaagatggaaaaagccattaagagtatcaaggctgaattagaaggccgactaacggaattgaaggcggacggcaagttgttggaagcccaacgtttggaacaacgaacgaattacgatcttgagatgatgcaagaaatgggctattgctcggggatcgaaaactattcacggcacatggaggatcgtgcggcgggggaaccaccttatacgttgctcgatttcttcccgaaagattcaatcatgatgattgatgaatcccatgtaacgatgccgcaaattcgcgggatgtataacggggatcgtgcccggaagcaaatgttaatcgattatgggttccgattaccaagtgcgcttgataatcggcctttgacgctacctgaattcgaagaacacgtcaatgaaatcatgtacgtttctgcgactccaggcccttatgaagctgaacaaaccgatattcaggtcgatcagattattcgaccaactggcttgttagatccgaatattgaggtccggccgattatgggccagattgatgatttggtcggcgaaattaatgatcggattgaaaagaacgaacgcgtctttattacaacgttaaccaagaagatggcggaagatttaactgactatctcaaagaactggggattaaagtccgttacttgcatagtgatatcaagactttggaacgaacggaaattatccgtgatttacggcttggtaagtttgacgtcttaattgggattaacttgttgcgggaagggattgacgtccctgaagtctcgttagtggcgattttggatgccgataaagaaggtttcttgcggagcgagcgctcattgattcaaacaatcggccgtgcttctcggaatcaaaacgggcaagtccttttgtatgccgataagattaccgattcgatgcgcaatgcaatggatgaaaccaagcggcggcgttcgattcaagaagcctacaacgaagcacatcacatgacgccgaagacgattatcaaaccagttcgggatgcgatttcggttgttcaatcagtcgaacaccctgaagaagtcaagatgaccaacgagattgatttcgatagtatgtcgaaagctgaaaaactagaaatggtagaacggttatctgaacaaatgcggaatgcggccaagaaactggacttcgaacaggcagctacgttacgggataccatcttagagattaagagtgaaattgattaaaagaggtaaagcatggcaaatgataagatcgtcattcatggcgcaagagcgcataatttaaaagatattgatgttacaattccacgggataaactggtggttgtgacgggattgtcgggctctgggaagagttcgttagcgtttgatacattatatgccgaaggacaacggcgctacgtcgagagtttatcggcttatgcgcgccaattcttaggccagatggataaaccagatgttgattcaattgatgggctcagtcctgcgatttcgatcgaccaaaaaacaacgtctaaaaatccgcgttcgacagtcgggacagtcacggaaattaatgattatctccggcttttatgggcgcgggtcggtcatccaatctgtccgaacgatgggactgaaattagtagtcaatccgttgaacagatggttgatcgtgtcttagcgttacctgagaagacgaaactccaggtgatgtcaccgattattcgtggcaaaaaagggcaacataaaaaagtatttgaaaaaatccaacgagaaggctatgtccgtgttcaagtcgatagtgaagtcatggacgttagtgccgatatcgaattggataagaataaaaaacacgacattaatatcgtggtggatcgaatcgtcgtcaaagacggtgtccggtcccgtttatttgactcgttcgaagcggctctgcgcttatcagaagggtatgcgactgccgatatcatcggtggcgaacaactacttttctcagaacactatgcctgcccaatctgtggctttacggtgggcgcgttagaaccccgcttgttctcgttcaacgcaccgtttggggcctgcccagactgtgatggtttaggggttaagctagaagtcgatatggatttagtgattcctgataccagcaagacattgcgcgaaggagccattgcgccttggaatccaattagctctcaatattatccacagatgctcgaacaagcttgcaagtcatttaaaattgacatggatcgaccatttagcaaattaacaccacgccaaaaagacattatcttaaatggttctcagggtaagaacttccacttccattatgaaaatgatttcggtggtgtgcgtgatgtggacgtgccgtttgaaggtgtattagccaatattgaccgccgttatcgtgaaaccaatagtgatttcacacggacgcaaatgcggacgtatatgactgaattaacgtgtcaaacctgtcatggtgctcgtttaaatcgacaagctttggctgttaaagtgggcggccaagatatcgttgccgtttcagacaacgccatcaaagaagctttaccattcttcgatcaacttgaactttctgaaaaagacagtgtggttgccaaaccaatcttgaaagaagtgcatgatcggttaactttcttgattaacgtcggtctggattatttaacgctcagtcggtcagccgggaccctttctggtggggaagcccaacggattcgtttagccacgcaaattggttcgaacttatctggcgtgctctacatcctcgatgaaccgtcaattggtttgcatcaacgtgataatgaccgtttgatcgggtcactgaagaagatgcgcgacttaggcaatacattaattgttgttgaacatgatgaagatacaatgcgcgcggctgattacctgatcgatatcgggcccggcgctggtgaactcggtggtgaagtgatggccgctgggaccccaactgaagtcgaacataatccgaaatcattgacgggccgttatttagccggttccgaatatattccagtaccgctagaacggcgtcaaggcaatggcaagaagattcgcgtgaccggtgcggctgaaaataacttgaagaatctgacggttgatttcccattaggtgaatttgtcgcggttactggtgtttcaggttcaggcaagtcaaccttagtcaatacgattttgaaaaaagctttggcacaaaagatgaaccgtaactcagcaaaaccaggtcaatataaaacaattacaggttatcagaatcttgaaaaactgattaatattgatcaaagtccaattggtcggacaccgcggagtaatccagcaacgtacaccggcgtctttgacaatattcgtgatttgtttgcgcaaaccaatgaagccaaactacgcggttataaaaaaggccgttttagttttaacgttaaaggtggccgctgtgaagcctgcaagggtgacggcattatcaagattgaaatgaatttcttaccagacgtgtatgtgccgtgtgaagtctgtcatggcagtcgctataattcagaaaccttggaagtcgtctataagggcaagaacattgccgaaatcttagacatgacggtcggtgaagccacagtcttcttcgcaaacattcccaagattgcccgcaagttacaaacgattgtggatgtcggcttaggctacgtcacattgggccagtctgccacaaccttatcgggtggagaagcccaacggatgaagttggcctctgaattacagaaacaatcaacgggtaagaatttatacatcctcgatgaaccaacgactggcttgcataccgacgatatcaagcgcttgttgggcgttttggaacggttagttgaagaaggtaacacgatcttagtgattgaacataacttagatgttattaagactgccgatcacatcattgacttaggaccagaaggcggcgataaaggcgggacaattgtcgcgaccggtacgccagaagaaattgccaacgtcagtgaaagctatacaggccaatatttaaaacctgttttagaacgcgatacagcacgcacaattgccgctcaggattaaccagaagatggttgatagaatgtgtttaaaaagcgggcggttaagacagaatgattgctgttttaaccgcccactttttgttttgtcaaatttagttgtagattgtccgtaaaaaaagtatcataaaggtattaacaacgagaggtgattgggaatgtttagaaaaaatgaatggcactttgattggtcagaatttatgacggggattattttcttaatcgttgcatattgcttgtttaatcaaccaggtaagacattatctggtttggtaatcgtgattgcgattgcggcgattattcggggaattgccaaaatcagtgcatatagtcggttacgtcaagagacagggatgcgcgcaacgttaatgttggtcgatgccattgtcgatgtcattttgggaattttgtttatcttgaatattccagctggagtggctgctttaggttatatctttgcattctggttcttgttcgattcaattgtggcattattgaatgtcggccatctcaagcaatttaacacaggcctatacatcgtttcgatgattctgaatatcttaggcgtaatcgttgggatcttattgttaatggatccagtggtgactgccgtaacgatggtgaccctagttggtttttactttgctttctttgggattaatgccatcatcatcgcatttgcaagacgtttatagtctctaaatttaatgattgcggaacaatttgattgttctgcaattttttttatggaaaaaataagctctttcaaatgcctagacattaggaatgaactcggtttaatagcattaaataacacgtgtcgagagtttcgacagctttcaatgacacaccaggaatgttacaatgataaaagcgaaaacttaaggggtggtctgatgacagatacattgaacttagtagtgattacagggatgagtggtgccgggaaaaccgttgccatgcaaagttttgaagatctaggttatttttgtgtcgacaatatgccaccgacattgctacctaagttttgggaattggttaaggagtccggcaaagtgactaagattgcattagtgattgatttgcgctcacgtgctttttacgatgagatcattgaaatgcttgctaaccttgataatacccaattcgtgacgactaagattctcttcttggatgcatcagatgaggaattggtttcgcgatacaaggaaacacgccgttcccacccactagcgatggaggggcgtttaatggacggtattcaaaaagaacggcgcctgttaactgaaattcgcaatcgagcacagatggtggtggatacttcaaccatgtcaccacgacaattaagagaaaagatttttcatgtcttcaagacgtcagataatccgtcattccatattgaagtgatgtcatttgggtttaaatacggtttaccaattgatgcggatatcgtcatggatgtccgtttcttaccgaacccatactatgtgccagcatttaaggaattaaacggtttagaccaaccggttagagactatgtaatggcgcagccagcgactgaaaagttctacgaacaatttagtgggctgttaaaagacatcatgccaggttatctcaaggaaggcaaaacaagtgtgacaattgcgattggctgtaccggcgggcaacaccgttcagtagcgcttgcccaacgattggctgatgatttatcgttcgattatccggttgacgtgacccaccgggatatgaagaaacgcaaggaaacggttaaccggtcatgacagctactaatcggattatccgggtcattaaagggcgacgaccaaaagtcgttgtgattggtggcggcactggactacccgttatcttaaagagtctccgtgaacagaatgcggatgctacggcaattgtcacggttgccgatgatggcggttcatccggcgttattcgcgattacattaacgtggtaccacctggtgatattcggaatgtattagtcgccttgtcagatttaccacagttaacgctcgatatttttcaataccgctttaaatcacacgatgcctttttctcagggcatgcgattggtaatttaattattgcggcgttatctgaaatggaatcaggtatttttgatgctgttcaacggttatcagaaatgatggcggttgacggtcatatttatcctgcggccaatgttgcgctgtcgttgaatgctgaatttaaagacggcacccagttaacaggggaatctgagattactgcagcacgcaagcagattaagcgtgtttgggtctcaaaaacggatcaagatgatactgcagcacccgaagccgttcaacaagtggttgatgcgattttggctgccgatgtggttgtcttaggacccggcagtttgtttaccagtattttaccgaatctaatgattaaaaacttaggtgcggcagtcaagcaaactaaggcggaagtgatttacatttgtaatatcatgacgcaaaaaggggaaacggaacactttaccgatgccgatcacgtccgcgtgttgaatgatcatcttggtcagaacttcgtggacacggttttggttaataccgcacaagtccctgaaaactatttggatcatcaaaagtacgacgaaattctctggccggttgaacatgactttgatggcttacgaggattgggttgtcgagtgatttccgataactttttgaagttgaaagatcatggtgtgttccataatggacaaaaagtagcgagtgaaattatgaatcttgctttccaggtcaatacagctaagcgaggtgaataatcgtggcctcatatgcaagtgaagtgaagaaagaactgacgcaacttgaagtgcatcctgaacatgcacgagcggaattagccgctttaattcggatgaatgggtcactgagcttgatgaatcaccaatttgttttaaacgttcaaactgagaatccggcgattgctcgccggatttatagtttattgaaacaaaattatcaagttgaatccgaattactagtacgtcgcaaaatgaagttaaaaaagaataatcaatacatcgtgcgcttaaagtatgataccaataccgttttaaaagaccttgatattgttgaggaggacggttttaccattcatacaaaggtgtcagaagatgtcattaatgaagatcagcgcgtccgttcttatttgcggggcgcttttctagccggtggctcagtgaataatcctgaaacaagccggtaccatctggagatctattcattatacgaagagcataatcaagatattgcgcgcatgatgaatcgttttggcttaaatgccaaaacgactttccgacggagtgggtacatcacttatctgaaagaggctgaaaaaattgctgattttctacaagtgattggtgctaccaacgcgatgttgaagtttgaggacattcggattgtgcgggatatgcgtaattcggttaatcgcttagtcaattgtgaaaccgcaaatatgaataagacaattgatgctgctacaaaacaaatcgaaaatatcgaatacttgcgcgacaccgtcggattagataatttaccggcgaagttgcgtgagattgcgctactccgtttggaatttccagatattacgttgaaggaacttggggaaaaaatgccgagtggggcaatttcgaagtcggggattaatcatcggctcagaaaattgaatcaacttgccgaagcccaccaacaggggaatggataaggggcaaaataaatcggtagtgtacaatatttgacttgtacaatataattaagtacaataactgaaggacattttatggaggaaaattatatggttaaaccagtattattagatgaacaactctgtttttcgatttaccgcgcacaaaaggcttacaatcatttctacggtaaggtattaaaaccttacggattaacatatccacaattcatcgcaatgcttgcattgtgggaacatggcaagatgtcagtgaaagaattagggcaccatttagaacttgatagtgggacactaacaccgcttttgaaacgcttagaagctgatggttgggtaagccggaatcgtgcattagacgatgaacgccgagttgacgttaccttaactgaaaaagcagaaagtcaaaaagaagaaatctacgaacgggttggtgcttgcacaaactatctcgatttctcaagcgataagtatcatgaattacgtcaagaaatgaatgaagttgaacatcatttgaatgcgattcaaatggataatgcacgtttttcataaaatgacggataaagggttccaaaagatttgatggtaaattgaattttttggaaccctttatcgtacatacaaaaacaggtgccccgaggggggggcacctgttttttattttagtagttgacttaagtcagtcatatcaattgattcatcaaagatatggtcaccaataatgatggtcgggacgaatttaatattggcacgatcggcttcagcaataattgcggctaaattttctgcattatcttgtggcgttaatttgagattttgatcgatgtattttttaaattcatctggtgtcagatcattacgccatgttttttgatgcgtaaacaagaatgatagtgtttgcagcactatttcgggttgatcaaaaggtaaataggtatgggctaaattccccagttgtagatcctctttatccttatcaaaaggtttgataatacgttttagccgaccagctttgactgcttcagtcatcgtttcttcggattttaaaaaccacttgcggcaataaggacaagcggcgttgataaattcaattgatgttaatggtgcatctggctgaccaattgtaataccgccggtggttgtcacattctcgcttttaatcacactaatatccatggaagaccctcctttaagatactgccagtataacaaatttggtataaaaaaagggctagatcaacttgatctagccttttttttactaatccccagaagagaaccggtttattatctactctattttggttggttgaccataatatcgtcaatcaagccgtagtcttttgcttcttgggctgtcatgtagttatcacgatcagtgtcagcttgtaatttttcgaaggtttggcctgagttgtctgccaaaatttggtttaaacgtttccgagtcttcaaaatttcgcgtgctgcgatttcaatttcagtttgttggccttgtgcaccacctaaaggttggtgaatcaagacagttgagttaggcaatgcaaaacgtttgccttttgtcccagctgagagtaaaacactggccatagaagcagccatccccattgcgattgtttggacatcagacttgatgaagttcatcgtatccatgatggctaaccctgcggtcacagaaccaccaggtgagttaatgtagattgagatgtccttatctgaatcttgcgcgtccaagaataataattgcgcaatgattgtgttagccatttggtcgttcacttcaccagataacatgataatccggtcttttagtaaacgagagtaaatatcgtaagcacgttcgccacgagatgtttgttcgataactgtcggtactaacattgaattgcctccttatataagccagagtagaatcactctgtagtctataaattgaattttacagcaaaggtcaattttggtcaaatggaaagcctcttttcagaaagattatggtcattttgtgttcgaactgaaaatatggtatacttaggaaagttaatcagcacttatcactgtagtatcaagtattatttgaagactttaatcaactggagtaaccatggagttacaagtagtgtaaagaggcggcttacgctgtttaaacgagaagatatttagaaacacaagaatttagacataattgaattaacccaaaaataaaagcgacgtgaatcacacgtcatctccactagccattcgatgctagtgtgcgtagccaattagtgactggctacctgacattatgtaagaatttaatatgcgaaattaattagaaggccacctaggaataggtggcctttgtcaatggtttaaagattgagttgttcatgaggaggactcaatcttttttaggttatatttgtaagcgctattgtcaaaatgataatcgcgtgctattatacgaaattgaaccggttcaattctattcaataaagggagaaatgactgtgaaattcgtagataaactgtcagaaaagatgttgccgtttgtttctaaactcaataattagcggcatctaattgcaattcgggatagcttcattgtgacaatgccacttgttatggcggcctcgcttatggttttattaaatgcgctaattttctcaaacgccgctgttcaaaagattgttgatttaagtggattagctgacctagcaacaattgtgaataatgggacgatgagtattttatcaattgtggtctgttataacatcggtgctaatttagcaacgcattatgttcgctctgggaaagtgaacgatcctgcatttagtgcagttcatgctggtattttaagtttggcaacaatgtttattttgatgcctgtgacgagtaccgtcactttagcaaatgggaaaacggcggaagcaacaggcgttttcttgcaaagtttaacctcgtcatcaggacttgcaacagcgatgttagcagcattgattagtacggagttattcattcgttttacaaagtttgaaaaaatacgaatcaagatgccagaaggcgtgccaccagcagttgcaacctcgtttaattcattggtcccagaagtcttggttgttttgatttttgctatttttgtatttattttaaatgtgacaaccgggttgaacgtccctcaattaatcgaccttgcgattcaaacgccactaaaatcgtttgtattatctgtaccaggtacgttattcttacaattcttctcagatttcttatgagtctttgggatgcatggttctagcattttagcaccagttcgccaagcaccattgctacaagccattcaagaaaatatggcggctttttcagcaggacatgcgattccaaatattattacagaaccttttacaaatgcgttcggcttgattggtgggggcggctgtattttaccgttagtgattgctattttatgggcttcacggcggaaagatcaacggcaagttgctaaattagggttaacaacttgtttcttcaatattacagaacctgttatgttcgggttaccagttgttatgaacccaattttcatgattccatgtgccatcattccatcaatcaatttagtgattgcttattttgcaacaagcttaggtttgattagtaaaacggtagcggctgcaccatggattacaccgcctgttattcaatctttcttggcaactggcggtgattaccgagcagcgattttaaccatcttattaattggtttagatgtctttttattcttaccatttgtcattgcaagtaacaaagtattaactgaggaatgaggtttttgaaatgcagtatccatatcaagacgcagcgctgaccattcgtgagcgggtcacttatttactttcacgcatgagtacgcaggaaaaaattggtcaagtgaatcaacatctttatggatgggaaactttcgaagattctcagtcattaacgtttacagaaaaattcaaggcgcatgttgaatggggcggcggtgtcggtgcactttatggtttatttcgcgcagatccatggtcaaaagtgaactttgaaaatggcgttcgtgcacaggatagttggcgagttgctaataaagttcaagaatatgtcatggcgcattcacgctgggggattccagcattaattgttgaagaatgtcctcatggccatcaagggcttgaaggaatctcgtatccaacgaatattggccgcggcaatatgtttaatacgcggttaatgcagcaatcatcgcatctgatggcacaagaactagcgcttaaaggcgttaacctagcgcttgtttcgacgcttgatttggtcaaagatccacgttggggccgttcagaagaatgttttggtgaagatcccattttagcggcgcgaatgagtgaagccgttgtggcgggttttcaaggggatttaattcaaagtgatgttgctttcttagaccaacctgctaaaccgcgaacgactgatgccattggtgttgtattgaaacactgtattgcgcaaggtgaagcattgggtggccataattcaggcaccgtcacaattggccaacgtgaattttcagacgtctatgaaccccttttgagtagtgtcaagaatgcggcaggtgtgatggctgcttataacgatgtggatggggtaccgtgtcatatcaatcagccgttgttgactcaagatttacgggatgtaaatgggtttcaagggattgtgatggcagatggtgttgcgcttgatcggttatcaggaatctttgaaacacaaccagaagctgcggcggcagccttaaatgcaggtgtcgatctaagtttatgggatcagacattcctaacgcttgatcaagccattgaaaatggcctagtagacgaagctgccttagataatgctgctggccgagtactagcgttgaaattcctgttgggtctgtttgaacaaccctatgtacaagccccgaatgcgcaattgacggccttgcttgaaaaagctgatgcgctgaatctgcaagtggcacgtgaaagcatgacgcttgttaagaacaatgggcttttaccaatccggaatcagccgcaaaagattgcggtgattggccccaatgctgatgaattatataatctcttgggggattatacagcagcacaaagttcagcgcgtcaagcgcaaacaatttatcaagcgattcaagaaatgtttcccgagtcggaagtcgtgtatgcattaggctgtgaggtgcgtaattcaattcatcaagaagaggcaattgccaaagtagttgagcttgcgcgcgatgccgatttaatcatccctgtattaggtggttccagtgcacgtaattttgatatggccttcctaagtaacggggcagtgagttcaaaaggcatcaacatggattctggtgaaaatgttgatgtcgcatcacttagtctgtgggccaacaagaagtgctgctcaagcaattgaaagcactaggcaagccaattgcatgtgtcatggtgcaaggccggccatacgatttaacactggtaaatgaacttgcagatgctgtattgattgcttggtttcctggtcaacaaggtggtcgcgtaattgctgaaactttagtgggacttaataatccaagtggtaagttgagtgtgtcttacccgcgcaatacccagcaactaccggtttactactatcaacgcgatgctgctaaacaagatgattactatgatgaggttggccaaccgttatatccatttggttacggacttagttacgaccaatttgattatcgacaattagcggttaagcaaatggttgacaaactagttgtaactgttaaagtaaaaaataacggacagtttgtaggtcaagaaagtagtttattatttgtcaaattaactggtggagcagttattcaacgaatgaagctgttaaaagctttccaaaagaatgccttccaaccaggtgaagaaaagagcattactttcgaactacctgctgctgattttaattacatggatattgataatcaggtgaaacgtgcgcaagcagcgactattatggttgctgatttagcggagaaaatcactttatcgatataagcggggaataagaatgtcatctgttagagaagtcgctgaattggccggagtctcggtcggaactgtttcacggtatctgaatgggcaacagcttaaagcagctaatcaagccaagattgcagcggccattgagcaactcgattacaaacaaaatattatcgctaaaggattgaagaacaatcaaagtttttcaattggtttattgatgaatagtatttcaagtcgatttggcgcggaagttgtttctggaatagaacaacgcgttgagcaacaagggtatagtttattattgagtggttttagtgaccaaccagcgttaattgatcaaaaaattgattatttaatggcgcattcgattgatggtttaattgttttcttagcaggtgaagaatggcaaggaatggaacgactagcggcacttgatattccggttgtgacgattaataacccaaatcagctacgcaatgttgattcgattttattagatgatcgcgcaagtgtggcacaagtgatgcaacaaattattgatctcggacaccagaatattgggatgattgccgctaatcaggatgattatgttgcccgtgaacgactggcaggtgctaaacagacgatggcagcttatccagacagacagttacatgtttttgaaggtgactattctcggactagcgggtaccgcggtgcccaagcattattagccgaaggtattacagctttatttgtcagcaatgataatatggcctttggtgcgctcacttatttatcagaaaatggtattcggattggccaagatttactatttggtcactatgattatgccgatgaacatcaatttggacagttgccaatcctatcgattcaaccgccaacagaagcgattggattggcagttgctaagttgttattagatcggctccaaaataagactcagtcagatggtcaaacgattttaatgcatcatgaaatcaatggtctaaactgaatcatcgaaaagggcgagtagaataatctacttgtcttttttgagtttaatccttagattattaatttacccgtccccgataatggggtacacttgtggtgtacattattttgcatgattattgaggagggcttggcgtggcacaaaaaatgattttggatttagatactgggattgatgatgcgttagcaattgcttatgcattgggatcatcagaagtcgatttaatcgggattacctcagaatacggcaacgttttgactgaacgaagcgttgtgaatagtcaacaaattttacatttattaggtcatccagacattccagtttatttaggggctgggcattcgacgacgacgcatgattttagcgtcttaccaattagtgcggaaattcatggtcaagacggcgttggtgagattcatctgacagagccccatccggaaatggcaactgaatcagccgttgattttatattacgtgcttgtcaggcgtatggggctgacttgagcatcgtggcaactggcccgatgacgaatttagcgttagcgattcaaaaagatttactaactttgaagaaagttggtcaaatcgtgattatgggtggcgccttaacagtttgtggtaatgtgtctccatttgctgaagctaatatcagtcaagaccctgaagcggcggacttactctttaagagtggtttgccggtgacgatggtgggccttgatgtcacgttgcgcacactttttacacgcaccgatacggcagaatggcgcgcactcggtacaccagcagccaaagcttatgccgatatggttgattactatatcaaagcctatgaagtcacttctccccatttacacggctgtgccttacatgatcccttagcagtcgctgttgcaatcgatcctagcttagtcacgacttccccattgaacttgaagactgagatagaaggcccgtcacgtggacgaacaattggggataatgcccgcctagatgatccagcaacgcggacggcggtttgtgtacaagttgatacgccgcgtttcttaactgaatttaaatcaagaattggacaattattagcgcagtagaatgagccatatagaatttcaaaaaagagctacgacaaaagtcaattttttgtcgtagctctttttttattgtacaggcgactagcaagaataagtcggctaacatgtagtgtgaatcatgattgctgagccagtcaattccttgattggcgatggcaaaagctttttgaaagtggtgatcttgatagagtgccagactatacaggtagaataagatattaatgttctcgtcatagtgcgtgaaccgccctgcattcacaattgcgaggacgtgttcgaagtcagtttgattagtatggggtgtactcttaataaagctgatactactgagaatcaaaatctcagtaggcgttaaaacttgttggcgcggtgtaaacgtatagtcgagtgccatttgtagttcccgtaaactatccgtggttgtatgaagttcttggaatactgcgatgccatgatagtagtagtaggtctgtaaatcggtcgccagttcaaggtgttcggccaagccagtcgtatccaaataatctaacataccgcgataatcgtgtgcattgcacagttgtttaatttgttgattgaattcgggttgttgatcaatttcgggataatgacttaacagcgcttgttctaacggcatattaagccgttcgcagagttttgctaacaaaatggcgtttggaatataagtgccgttttcaatatgactaatcatcggttgcgaacaaatatcctgggctaattgatgttgggacaagccttgcgcacgacgaaccgtagcgagtttacgccccatggtcgcggcaagtagattatcgggaatagctggcactactaacacctcacttcatatgattgctttaaatttaacatgcaattttcaaaaagaaaaggagctggactgcatgccagtattgattattatattagggtttgcgtttattttccaaaagccattagtgtctgcagttaccattgtgtttggcgcgctattgggtctttggttactcagaggaataatcgtcttgatgatgttgataacacttggccattattggcgtcagaaaaattaaaaaagaccgctgaataagcggtctttttgattgcttagaattgatagtccgggtcaataatcaaaacgggtttgattgtttcacctttaatagaggcttcgttggcagtgttgatgtcttcgaattgataaaatttttcggttttatcaaaggggaacatgccttgacggtagaattcgattaaacgagggacgtcgatttgcggaatggagtcacccatgttgacgccgacgacggatttgtcgttgacacataagtcgttccaagtatcaagatcgatgtggtttggggttacggcaattgttgctgacaccccaccttggcaaagcgccttaattgaatcttccatgactggtgtaatccccgtggtatcgacacagaagttcacgccgcgcccatttgtgagggcttggattgctgcgacaacgtcgtctgtttgacgactgttaatcgtatcggttgcaccgagttctttagcgagtgcgagccggtcgtcgatgatatcgacagcgatcactttcgtacagcccgaaattttaccggccatcatggctgcgagtccaacagcaccagtcccgaagacggcgattgtgtcgccaggttttggttttaaagtatttaaaacagtgccactaccggtcacgtatccacaaccgagtggtccgagtttgcgtaagtctaaatcgtcagggactttaaccgcatttcgttcgcggacaacggttgtggttgtgaatgaagattgatcgaacatatcggcaatgtgatggtcattttcagtaaagtgggaactaccatcagggcgcacgccggataagttattttctgcgtagttgaggcattgtgttggaacgcctttgagacagttttcacagatgccacatgcgtagaatgagagaacgacatggtcgccaacttttaaactttgaacgtttgaaccgactttttcaataattccggaaccttcgtggccgaggacgattggatagccaataatggcgtcgcctttacgaagcgcttcgtctgagtgacaaatcccactagccaccatgtggacttgaacgtcgtctgggtggagtggtgcgagttcgatgttatctttaatgacaaatggtgcgccttgttgttcaacaacagctgctttaattttcatgcaatgatcttctaacttaattatttaattcacaagattattatagcattgttgaaatcgttttcaattaaaaattgacattggcgctaaaattgccaaccgtgttgttctaagtcccactggcgcttaggcagaccactcacatacgggttaccagcgacataatagcgataaggaagttgaccactcgctgctttataattgaccccgattcgtggcgcggtgacaattgatttggggtggcgacgatgcgctaaatcaatcattaaaggggcgtccgccacattttgaaaagtcagttgtttatcgtgaatgccgagggcgcccattaatttaccggggccgttagtcagttcgacgccaggtttcgggcgattgaggcgcatttgttcaatgccgtgggtcggttcgatggcgcgaatcaagacgccttgtggttgatccactgcttgggtcacgatatcaaatagaaagaaaccgcgtaattgatagatataaattgtaccaggctcatgatagagcggctcgctaaagggtgtgcggcgccaattgtaagcatgcgcggcagtgtcatcggtgccgacataggcttctgcttccacaatgaggccgccaagtgtgccttggtggctggtataaagcaagtgagttcctaataaatcttgcgcgatggcttgggtagaccggttcgtaaaaaatgatggtgctgctggttggcttgttgtcataattaaaacctccgagttaaaacgaatcagctttattttaacaccaaagacatgacatttgtcatctgtaagtcatgacaaaatcgtctaacgacaaaacggaatcacttctatactagggttattaaatgaggtgatgacaatgattgaaattaaactagtgacaatgcaattcgaacaacaagttgttttaaatcaggtagacttaagtgttcaacctggtgagattgttggcttagtgggtgcaaacggcgccggcaagtcaacattgattaatttaattttaggccgactccaaccaacggctggcgagattcggattttaggtcagaagccaacggagaaagaacatttcaacttattgggtgcgatgatgcaaggaaatgtccgactggatcgggtcagtgtcatcgaagaattagaattggtttgcagttattatcaacagccacggtcagtcgctgaattattaacgctagctgatttgaaggcacagactcataagatggtgtcccaactttcaggtggtcaattacgccgcctctcctttgctttagccatggcaggcaatccggatttgctattcttggatgaaccgaccgttggaatggatgttggcagccgacaaaaattctggcagcaaattgaacagttaaaagaagccggcaagacgattattgtcacgtcgcattatttagaggaaattgaacacattgcaacccggattttattattgaaagatggccagttccaattcgatggtgacttggcaacattacaacaacaatttaaaggaacgcagattcgctttacgactgatttaccagcagctacttttgcaaaatggccaggcgtgatccgcgtgacgaagactggggccaaggtgctgttgcaagttaccaagagcgatccgatcttaagtcaattagcaccaatgatggggatccaggttcatgatgtgcaggttcaagcaagctcattaaatgaaatttatagcgaaatgatggaggactaaaaaatgcaaacaatgatggtacaaacaaaaatagactttaaacgcgcatattggcgtaatccacgctttgttattttttcactcttaatgccgattgcgttttatctcttgtttacgaaagtaatgaaacagggtgtgatgaatgcagcattcaatcgacaatacatggtcagtatggcgacctatagtttagttctcagcaacacgtttactttatcgacattactttataatgacgcacgggatggcttggtttccttaatcgatttatcaccaaccagtcatcggacttattatggggctaagttgttgaacttaggcttaatcaatgctttaacgatcggcgtcattttcatagttgctgggattagtaatcaaattcatttagtgtggtccagttggttattaacggcgggctggttgtggtttgccagcatccccctttgtttaattgggattagcatttcatttttaaaagatgaaaatcagattcaactggtgtctagtttgttagctttccccttagcaattttagggggattatggtggccaacagaaataatgcccaaaacagctcgcgtgattggcaagcatttgccggtttatccgattaatcatattggccaagcgctgattgcgcatcaacccgcacacttgggtgaatatggcatcacgttgctctgggctgggttattactggcaattgtcgtatacttaaaccatcataaaagaggagcgatgcatgcatgaatttttttaaacgctacattgccatgccaccccaatatggcttatttccatatgtttggttgattttcttgctctttccaattggttatgcgtttccgtatcaaacggttaagcagcaagcgattatgggcttgattctgattttcttggtggcttatcgcaatgggtatgtcgcatcgcggtatcgcacattctggattatcttacaaatggtgaccagtgcgattttagcagtcattatccaggcgttttatctgaatatttatactgcctgggtgtttggttcgattcccatgcgccgccgaagtttctggcgctattactacgcttatctgttgtcactaatcataccagcggtcaccctatattggtattatggtggtcatatgggacgcgataatctgattggcttaatggtgtacggcttgttctgcatcttttcaccatttgcggctagctcgattcagcgtttcaatcggaaaaatcgccaattaacgcagaccaatcagcgattaaccgatatgattaagcagaacgaacggcaacgaattgcacgggatttacacgataatttaggtcagtcattttcaatgattacgctaaaagcggaatatgcacgtaaattattggcgaaaaaaccggccgcggtacccgaacaactactcgagattgaacaagcctcccgtcagaatttaaaaatagtgcgtgagattgtcgctggtttacgccaagtgaccgttgctgaggaattgatcaatcaagaacggaatctcagcgttgcaggcattttactgctgactaaaaatgaagaccaacttgaagggattccacaacaaaatcaacaagtgcttgcgcaatgtttacatgaagccgtgaccaatataattcgctacagtcaggcaacggagtgttacgtggtttttaatcgaaccgcaacgacttttcagatgcagattgaagataatggtcgcggattgaaaagcgaagatcaatataagagtcatgggattgtgggcatgcgcgaacggttagaaacgattgatggagagttgatggtcgatggtcgccggggcacacagttgacgatgacggtgccacttaagatggagggaagggcatgattaaactttatttggcagaagaccagcaactattgaataccgctttagcgggcattctggatttagaggatgatttgacgatggtcggaaccgccgtcaatggacaagtcgcacttgatcagattgaaaccctccaaccagatgttgttttgttagatattgagatgccgggcatgacagggcttgagattgcgcgccaactacatacgcgtcagccacagattaaggtgattattctgacgacttttgcccaaccgagttatttcaagcaggctatcagcaccgaagtggcagggtatctattaaaagatggcccgagtgatgacttgattgtggcgattcattcggtcatgaagggcaaagttgtttatgcgccagaattagttgttgggctgacaacgcaaacgaagaatccactgtctgagcgggaaacggaagtattgcgtgcgattgctaatgggttgagtacgaaacaagccgccgaatcattatttttatcggatggaacggttcgcaattacatgtcgacgattttaagcaaattggatgcaagcaaccgcgttgaagcaattcagattgcacggcataatggctggctgtaagaggcagtaaaattgcctctatcatgattgttctctatgatgaaagcaaacaaggaggacgaaacaatggcattagcaaatttgcataaatgggcgtttttctatttttcaccagacttttcacctgaacaaaatacggtgattaaccgtaatccaatgggaacgtgcgagatgattaccgtcgggttcgatccacgtgctaaagaagatggttcaattattgaagtcgctaagcaattgaaggcagaaggcattcaatttattgaactctgtgggggcttcggaccaacctggacgactaaaattaacgaagcactagacttcgccatcccagtcggagcagtcatgtatggtccagaattcagaaaacaattgtttgaaataatgaactaaagagtgcgtcaaaagcgggtatactgcgagcattagcctaacaaggcgaatgattgctgaaagcaatcatttgacttgtgtagctaagcacagcagtatgcttttgaaagcacgtttcgaataagagtgcgttcaaaccgtttatgttctgaggattagcaaaattagacgaaaaagcggcgaagccgcttatttggctaattaggctaaacgcaggaacatggtttgaaaagcacgtttagaatgtgccgtcagtcgagaattccgtctaattaatattgtaggcctttgtaaaagttaattttacaaaggcctctttttttaggcttattatttaacttttgactgatgatttggtatactctacttattaaatgtaaggaggcgtgtcatgcaaagagggcggcagttcttaaaacttagtgttagtgcaatttttatattcggggtgttcttattatgccaagtttcgggggtgcaagccaaacaggttcttcagcttggcgcgcaagcaccactagataccattgatatctcgacttcaacgggatatggtcaaacagggaacatttatgaaagtttattccggcttggtgagaacggtaaaattgaaccaggcttagcgaaatcgagttcagtttcagctgatggtaagacgtggacatttaaactgcgtgatgccaagttcagtaatggtgacccgattcaggcgcaagattttgtctattcatggcaacggacattgaaaccagaaaccaaatcaccttatacaaaccttttcagtaatatccaaaatgccccagcgattgcaaaaggtgagatggcaccagaccaactcggcatacgggcagtggatgagcacacgttggaagtcacattatccacacctgtggcctacatgaaaaccttgatggcttatccattatttgccccacaggatcaaaaagtggttgaaaaatatggtaagaagtatgcgacaaacgcgaaatacatggtgtactctggtccgtttaagttagttaactggaatgggacgattgagaagtggcaatttgtgaagaacaatcaatattgggatcgcaaaaaggtaaaattagaccaagtcaactataccgtgttagaaaataccagcaccgcgctttatctttatcaggaaaagaaactggatttaacccagttggataatcaacaaattgataattatcgggatgataaagcattccacagatatccttatgcgttgacgaactacattaaatacaacttcaaatcagtagatgaacagaaaaaagcacttttgaataaccaagactttagattggcgatttcgttagcgattaatcgtaagacgttgaataaccggctattcggttcgaagaaaaacgatattactggtttcgtgccagtgggcttagccgattcccctaagaaggtggactttgctaaatcacaagccgtgccagataccgtggattacaatcaaaaattagcgcttaaacattggcatgaagcactgaaagcgactggtcaaaagaaagttgccctcaccttaacgcttaattccgatgatgccaacgcatcatatgttggtcaatatctcaaaggtcaacttgaaaaagtcttaccaggcttcaagttgacattaaagaccgtgccaagccaagtttcagcgagtcgtgataaaaaaggcgactatgatttattactcgcaggttggggggcagatttcaaagacccaatttcgttcttagaaatcatgttaccaggggctgcaagtaataccggtggcttcgacaatccagaatacaaagctgcccttgaccgcgcaatgaatgccgatgcgaacgatcctgacaaacgttgggcggacctcgtgacggctgcacaagtcatgaataaagtccaagggattacaccactctatcaaaatgatacggcatacttgaagaatccaaaggtcaaaggcgttgtgcataacacagctggcgcacaatggagctacaagacggcttatattaaatagcgtgtgaataatcagccagttatagcctaaggattaacaagaaaggcgccagtccaaaatctattttttggctggcgccttttttgtataaacaaatcattatggttctgaattttgctgtgctaaagtaagggtattcaataaaagaaagagggaccttaaatggcaaaacaatatgaaacaacgatgattaatgaagggggccgcaatggcttcgtttattcacccgatcaagcaaagaaatatgtaatcaagtcaccagggacagacccatcagggaagagtacaaatccagagcaactctttgcagccggctatagttcttgctttaacagtgccttagatgttgtccttaaccaagaacatattaaaggcgaacccacgattaaggcgaccgtttccctttatagtgatggccctgccaattattatattggtgttgatcttttcggtcacatcgaaggtttatcagaagaagaaacaatgaagtatctcaaaaaagcagacgaaatttgcccatactcaaaggcaactcgtggcaatattgacgtcacgattaatgtgatgtaaatcattaaaaaaaggaatcagcgactgctgattccttttttggtggttaagctttcgatgaatgtggtttgccttcttgtttgaggacggattgcatggctgggtcttgtcgcatgtgttgatcaaaacggtccagattagggaagtcagtcaatgaaaatgcgagtcgtcgacaccaattggtcatgacgaatagataagcatcaggagcactgaattgattagcaactaagaaggactggcccgctaacgctttttcaatataagcgatccgtgggaaaacccgtgaacggactaaatcttggctttcgggtgtattggggagccaattgcctttacgaaatggtgagatgaagttcttatgcaattcggtggcgatgtaattcaaccacatgcgttgttgccagtactgttcagtggcatagttcgccattaatggcagcgaactttggtgactaatgtattccaaaataacggcgcattcagtcatgaaatcgcccgattcagtttgcaaggctgggatgtaattcttcggattgagttgatgataatcactaagtgatgtggtatgggtatctaagttaactggcgtaacggtgatgaattgcaatgatggtggattataatggaattgacgaaagatactgtaattgcttctttgaaagcgttataataacgttgattaaagattggggggatcagtgatgagtacgaaagactattttaaattttttacgagcaccactttgacgggcgataacaatcgtgcgtatttggtgacagtgacgcgggcaatcgattctgagcaattgaaaagcgtgctggggaatactgtgacttattttaatcagtacggtgacggctttccgtttacttcgccgtttacgattgaccagttgaatccaatcgtcactgaacaaactgatttacaaccgactgaatttacgattattaaccatgggattggcaatattcttgcctaaaaaagggattgagacaaacgttgtgtttgtctcaatcccttttctgatggtcaaatctaatcgtctaagcgtgctcgggaaatcccagacttccgtcacactcttttaatttctagcatatttatgttcatcggcatagctgaaaaaatcggctttggcagtataatcaccgcgataaacgccgttccaaccagcacgttggccaaacgcgcctaaatcaatcaataggtgttcttcatccttggtgagatgaatcttgccaaagccaacactatagatgtaattggccaggcgattgacgagtgcctcgggattcttaaccgtatcaattttgaggtagacctgtagtaaaacatcggtaatatctaacaatgcatttgatttatccggatgcgccattagactgttgtaaagtgtatggatgttttcttttgcaattgattgacttatcatttaaacccctccaaataacaataattcacactagttatagttcctttttagttatttgtcaatgatgtagataagcgttatgattgtctcaacagttgattaagagtaagggacgattgaatatgaaatggtatgcagatggacaggaacgtgggcatcaagcaattacaatgattaaggcattattaaacgacttgaaacaagatgaccaagcggcaccattacaatcagttttgcatagttatcaaactgaaattgaagcacaaacgacagcagtaccattaattttgagccgaatgaacatcgcaattgcgaatgtgattcaaaaagaaggcttggatctatcagccagtcaacaagctaagttaaaagaaatgacggcattatcgatgattagatatggttattagtttagtaggggatccagaaagaaattgttgaagatcggaacgttatgccatcggattagcttttttatagttttattgatattaatgatgttcgtccatatggaagcccttttcgggttgagtacaaattatatgacgacgcatgaaccagcattgattgctgttaattttggggtgtggctaataatagtctttttgtttactagaatttatatgagacaaccaaaacctgactggcaaaatgtgtaaagagagccgatgctaaagaaagttgtacttattttagtgatgtttggtattgtgctagtgattgatcggatcgataaacgttggaacccattagcgctgccggagaatcaagtctatattaatgagctaatgaaggctgttccgattttgacgacactcagcaatgatttgtttgcaccaacactagaagaattattatttctggtattttctttaatctcttttttattaaaaaaacgaatgcgatacggtgatgaaaattattgtatcagggcttgcttttgggtgcgcgcatcagctgaaaattgactataattggcttatttattgttcatttggatggatattgggcagtacctatttttggacgaaggatattagatgttcaatagtgctccatatgctcgttaatctatttttaatagcacattgtagataaaatgatttaaatgaacgattataatgacagctaaaaagttaacgactgatttggtcatgttgaacacctcatcattttatttcatggctactctagtgctatcttgctggttaaacaactagaatgagaacttaataaccaccaaatgaaagcgttctaatttaaggccgttttgttttgacaatgcttgataagtggcttacatttaattgtgaaggatagcacaacctatccgcagacatttgtgtcaattcaaatggaagaggtggccagaatggcaacgaatcaattagtattaaaaaccgcagacatttgcgatatccgggatattgaggaagcacgggcaaccattaaaccgtatattcgcgaaacacctttaattcaatcgatgttcttgagtcgtaatgtggcgcacggtcatgtctatttgaaattggaaaatatgcagctgacgggatcgtttaaattccgtggtgcgaacaataaaattaaccatttaacgccagagcaacgggctaaaggcatcattacagcttcagccggcaatcatgcgcaaggggttgcattgaccgcgaagttattagggattgatgcgaccgttgtgatgccagaagaagcaccgcttgctaagcaacaagcgaccgccggttatggggcgaacgttgttttacatggtacgacttttaatgattcgcggttgtacatggagcagttagcagccgaaaagggcttaacaattgtccacccctacgacgatcgcgaagtcatggccggccaagggacaatcggccttgagattttggatgcgatttggaatgttgatacggtgattgtaccggttggcggtggtggcttaatctccggcattgcgacggctttgaaatcctttaacccctcaattcacatcattggggttcaatcggaaaacgtgcacgggatgacggcttcatttgaagcaggcacaatcaccagccatcatgcggacttcacgctagccgatgggacagacgttgcgattccaggtgaactgactttcccagtggttcaaaatctagtcgatgaaatgattttagtttccgaaaaagaaatcgcaactgcgatgaaggatctcatgcaacggactaagattgtcacagaaggcgctggtgcattaccaacggcagcactgctgagtggtaaaattgatcctcaatggttaacagataaaaatattgtggctttagtttcaggcgggaatgttgatttaacccgcgtttcgggtattattgaccaactcttccacccagctgatacaagcaaaggggttgttggataattaaaaagccggcatccgtctaaaaacggatgccggcttatttttgtgctgcaagaaaggctggaccatgatcgtcaattagggcgtgaaattcttggcagtctttaacagtcatttggggtaagagctgtggttcaataacctgttgtacctttaaatagtggaggtcttttaaagaacagtgctctaggtgagcaattaagcggcgggcatataaatcagcgataaagactgggcggtcgaagacatataataaaatgacatcggctgtttccggaccaatgcctttgatggcaagtaactggcgccgtaggtcagtggtggttgtcatctgattgagcgtgtctaagtcaaaatcaactgtcgctaaaaatcgaaacagccctttaattgtcctgcttttagcgttattgaagccgctgggtttaatagccaacataagggcttcatccgaaagagaaagcagattgtttggctcgaagtgcgtacttgatcgtagattggcgagcgagcggtcaacattttgccagtttgtattttgaactagaaccgcgccaaccattgtttcccaatgggaatcagaaggccaccagtgttgcggcccatattgccgatacattgtttgaaagagttggtagtaatcaattttaccgttcatgaaaaatgtttccttaacataaaaagacgctacttcacctttggcagtcacttattgtcaattcgcttggtgcgcagttgtagcagtttggaagttgtggctaatgagatggtggtcaaaatgatgaaaaaagtggttgaaagtaagaaacgcggcatctgcgccccagaaaattttaaaataatcgtggtaagggtactaaaagtggtgaggatgtttaaaatcatgagtgaaatttcgtagttgcccgattgtttcgaaatgacgtggccagcgtataataagccaacgccgaacaatatatatgagaaatagaaaataccgaagaaaacgatgaaaatagttaatgattctttggcgtagacgagaatatcggtactggtaaagatgcgaatcaaagtatttagaatctgataggtgagataaagtgttgctagatagataaaagtggggaagtttcgtttgataaaggccatagcaatctccattgtttttttattgtaaagcttgtcactattctagcatggaatttaagaatggtcagttgaaagtcagccgagaatgcgtttttatttgtaattaatatcatctgcgttatacttgagttgtgtaaaatagaataaggagtgatcaatgtgaaaattatcgttgtcggttcatctcatggtggatttgaaactgttcaagaaagtttactcgattatccggatgcaaccatccaatggtacgaacaaggcgatttcctatcgttcttatcctgcgggatgcaactctatttagaagggaccgtcaaaaacgttgatgatgtcagttatgcgacaccagaaggcatgcgggcaaaagggattgaagtcaacctacaacaagcaatcaccgcgattaacgccgatcaacatacggtccaagtgaaggatttaaagaataatacaacgcgtgaagaaagttacgataagttagtcttgagtgtcggcgctgtaccatttgaattaccagtgccaggccgtgatttagagaatgtctacgcaatgcgtggccgtgattgggcgattaaattaaaggcgaagacagttgatccaaccgttaaaaatgttgtggtgatcggttctggttatattggcattgaagcggctgaagcatttgctaaagctggcaaacatgttacagttgttgatgtcttgccacgtctattaagtctctatctcgatcaagaatttacagatcaattaacggctgaaatgcaagcgcacaatatctatcctgcagttggtcaaggcgtcaaagaatatgtcggcgttgacggtaagctaactaaagttgtgaccgatcaagctgaatacgatgctgacttagtcatcgaagctgctgggattcggcctaacacaggctggttaaaagatacattacaactcgaccgcagcggccggattgaaatcaatgaattcttacaaacaagccaacccgatatttttgcagtcggggatgcaacggttgtgaaatacgcaccaactggcaaagaaatgccaattgctttagcaacgaatgcgcgtcgccaaggtcgctatgctgctaagaacttagtcaccgccaaccaaccggtacccgctgtttcaggttcatcagcattgagcgtcttcgattatcactttgcttcaactgggattaaagaaggaacggctgataaaatgggtgtgaagacccaatctgttttggtttctgaaacatatcgcccacacttcgtccctgaagcagaaaatccagtggtcgatttcaaattaacctttgatccagaaacacggcgtgtactcggtgcgcaaatcatgtctaaagctgacgtgacggcaaacatcaacgccatttcacttgccattcaaggtaagatgacaatcgatgatttagcatacgctgacttcttcttccaaccaggttttgaccgtccttggaacatcatgaacgtcgccgcccaaaaagcacaacgacttttagacaaataaagtgcaagcagctgtcaattgaagattgatggctgctttttgtgctgacatggttcgccaaataggcttgatgaagacggtgattgtcattggattcgtgtattcagctggtgtattgctcttaacggggcttacgcttggctattcaagtgtaagacgttggcttagaaagaatcgctaataaaaaaggattgtggatcgataaaaatatcgattcccaatccttttttactatattacccaataccgatcacataatatgcgagtttatcggcgtagtgtcgttggttattttgttgtttagcttgcttaaccgcggtgagattgtcggtgaccacgccgtctgcaccgaaatacatcatgcgttggacggcttgttgatcattgggtgtccagacaaagacggccttattttcctgatgtgcagcttgaatgaagtgactgttgacagttgtcatttcaacggcataaaaatcagcgttcgaaattggtgggccgataaaattaaaggggagaatgtagcccgtttgaatcttcggtgctgcctttttaacggcctcgacgatgtgccagtttaaggattgcaccatgtgaccgtgagcttcgatattggcctgatacttattcaggaaatgttgcaccaagccgggattatcggtggtgggtgtcttaatttcaatcagtagtttttgatgaagctgattggcgcgtgcaagatagtcatcaaatgaagcaattggtgcggattgccgatgttcatggacggtcattttagtcagttgcgccagtgttttagactgcggggtccctgagtgcccagtgagtggggcaagttggaagtcgtgaaagacgacgaattggtgatctttagtcaattgcacatccatttcaacataatcgggctttaatcgggtagtttttcgcagcgcactaatcgaattttggacgccgtctttttgcgaaacgccacggtgggaaatgcttagcggctgctgaatggttactgaacggagatagtcccaattataagtcccaacgccgattaaaacgcaatttgctacgaataataaccaacgaccactgagctgcacgcttaattttaaggttgcatagttgaacgtcggttgcacaaattgtgggtcggccaacaaataatcaatgacgatgaaaaagacggcgactgttgaaagcaccaagttgatgagcatagcagcttgcaacaaggtcatgatgaccacggcacttggcagtcccactgatgtgtgggtttcaatcaacgcttgtagttggatgagtaggaaaaaagtgagtcccgtaaagccaatcagtgcggcaccgattaagagtagacgccccagtaatgagccaattttttgatgtgtaaactgccaactactggtcaacgcttttttgaaagtcatctgctgaagaatgatgtttggtagggtgaagatcagccgtaagccgagatataataagcccaaatagacaagaatgaaaagtcccgcgacaattcgccgattcatgagaatataatccagaatgaatgccggtattttaaacttagtcaataaatcagaatgatagccaagcccgcccagcggtaaaattaaaagacaataatatagaaagaaaaagaacgtgccaattcgaaggtgcctgagttgcgcaaaagtcatcttcagcaatgcctgcaaagctagcggccgtttaatctgaataaagtacacacttaatagaagaaacgtgaattcgaagaaagccagcaataaaattagtagcgcaattcctacgagtgctaacagcgcaatcggatgctgatgaataagcgctggcaagttgctcaacgcgagaaactggatctgattatgtaccagaatgaagtagctggctttactcaaaagcggtagacaaattaaaagcaaaaagccatgcatcaataacacactacgaaaataggcctgggactgctttaaaaaagtgaatgtacttgtaaataggattttaaaatactgcattgaatgggtgctcctcaattggactcgtaatgagataattgtacaacaaatatagaagcgtgtaatatcgattaatctttgtatttaatgaagagtttgttatagttattaagttaatagtatgaatgaaattgctaaagctatcttgtggaaatggtagattgtaaaaatattttagaaacaccaattacactaccctcaccggaagaacaaaccaagttgggtgaattctttgaaaagctcgataaccttatcgctgctaaccagcgtaagttagatttgctcaaggaacagaaaaaaggctacttgcaaaaaatgttccctaaaaatggtgaaaaagttcctgaattgcgatttgcggggtttgctgacgattgggaagagcgtaagttaggtgattttattgatgttaagtctggaaaagactacaaacatctgaattcgggatcaatacctgtctatggaactggtggatatatgctaagtgtagatagagcgctatcagatatagatgccattgggatcggaaggaaagggacaattgataagccttatttattaaaagcgcctttttggactgtcgataccttgttttacgctgttcctaaacaaaatattgaccttcaattttcactatctatttttaaaaaaataaattggaaaaaatttgatgaatctactggtgtacctagtttatcgaaaactgtaattaatagtgttggtgcttctgttcccagttatgaagaacaacaaaaaatcggttcattcttcaaacagttagataacactatcactcttcatcaacgtaagttagatttgttgaaagaacagaaaaaaggctttttacaaaagatgtttgtttaggggctataacttgattaacgggctttgaaattaggtcccgagggacctaataacttaatttgatggtcggttaatccgaaaatgacaagtcgttacagtggcctaatcactgtatccgatagcactaattggttttggcgaaccaattagtgcttttttcgtttatattgtattttaccgtctgactactttccaaagcactcaacgttattgtattaacatagtactgtatagatttgcaaaagcagcaagaatcaatataacaatctgttacattgattcttgctgctcttagctacattttacatatcgacatttaaataagttttattttaaaatgtcaatcaaatttttatccgccgcttgtctggctggcaatattccaaatatcaccccaacgacggtagaaattacaaacgatgtgacaaaagacgacgcagtaataactgccggaaatggtaagaattgggaaataatcattgccagacccgctcccattataaaaccaagtaaccctcctaaagtagttaaaattaccgcctctaacaaaaattgaatcatgatttcttttttctttgctccaattgccctacgtactcctatttccttcgtcctttctgatacagatatatacaacatattcatgacaccaattcccgcaataaataaggatatccccgctatagcactaatgaaatatgttattcctgagataacattgcttacaccactaagtaatgagccgatgtctatatattcatatttaccattagttttttggctgccattcttgtttaaattttttactacgttttttgcggccttttcgatattaacatttctttgaaaggttactttaattgtgtctccagttgattttgtctgtgcagatttatatgtcgttaagggcagtattacgtctgttgaaagaccatcattttttttatttttaaagacacccgttacagtatatgtcgtattatcgactgataaagacgaattgagcgcattagacggagaatcataatacttttttgcgacggaatcggaaatcattgccatgggttgaaatgaatttacttgagccttagaaaggttagaaccgacaataatattttcgttagtcgcttttttagttaaatggaatgttgcggatttcaattgcccgttaataattaatttatttgaaaacgaattcttattatccaaaattgaaattttatcaatagattcgtcagactgttttaaaagctctatatcttcagtagaaaatcctcgcctataggaattaggattcttatccgtgtacgttatttctatagtctgacgccctgagctatctgcttgtagattctttagcgtctctttcttaattccattccccaaggatacgatcacgacgaccgaagcaattccaatggtgattccaaccattgtaagtaaacttctctttagattagtttgtatggacttccatgccgtcaacaacacttcaatcactttcatgtcatgaattccttcctgtatcagataaaatagcgccatctgaaatagtaataattctgtttgtttgctgggcaagttgcaaatcatgagtgaccataatgatagtcgttttacgcttatcattaatttttttgaagatattcattatatctcgggaagttttactatctaaagctcccgttggctcatcggcaataataatttctgggtccataattattgctcttgcgatcgccactcgttgttgctgtccccctgatagttcattcggccgtttactttctaaattgggcaaatcaacaagatcaagcgtttcagaaaccacctttcgcaatgtagatcgacttttccctgcatataacaatgggagaactatattttcatacacagacaaattctcgattaatttaaaattttgaaacacaaaccctatgcttgtgtttcttaattctgataactgattgtcagatagctccctaatatccaaccctaaaaaatgatattgacctgaaaattcagcatctaacaatcctaaaatatttataagagttgactttcccgcaccagatttcccaacaatagataaaaactcacctttagatatcgataaattaatagactttaaaactggattttgatttgatccacggtaatacgacttaataagtttagtgatttcaatcatgtatacctaccttcttgttgtttctcaaatttgaatccggatccgttattatcttcacattttcaggcaagccagaattaacaattgcatagccatttttctcgctgtacgtaatagggaccttggatacttttccatcatttttgtagacataaacatactttttggcaacaacagaggtcgtcggaattcttattcctggatgagtagacaatatttttaatgtttgtccatccagatactctgacgaaatcggtgctgaaaatgagtattcagcctgaccatttttactagtatcatttgatacgaaattcagttcaccgacagtggtgcttgtcgtcttgtttgtagcaggagcaacaattttaactgtagaactattcatcaaatcatagtaatcatattccgatacgtcacctactgcgtttttggaatttgaatataccgtcaatgacggaataccatctttaaaatgcacactaattcttccgtcaattggagattttaggacgttgtactgagaagttattgtgttattcaagtcatttttcatattttgaagatcagtttgcgcatcaattaacgagtcgttaacttgtgcaattgatgttgaagcatcttgaactgaattttcagatgtcgcctgagattttaaattagctaactgatttgtgtactgggttattagacgtgattgcttgtcaatttcttgtttctgcttctgtatgtcacctgttttgtcatcaaaggttgttaacaattcttgattagctgtaacgtaatcgccacttttaatcattaatttagaaatgtttgtggatggtaattttaatgtgcgaacatccgctgattcgaccttacccgttaaactcaatgaagatgtcgaagtagtcataatgcggtaaagtctttgagtcttattcgtcgtatgtgtacgtccaaaaaaaataaaaataataacgaaaattcctaacagcgaaagaactgcaaccataatgacggtatttctacttagtttcataattactccttaagtaaattttcctctcaattcacatgaatatgaaaaacaatgaataaaaagttaataagagtggttctttaattatacacgaattataatatgctatgtaataaatgtttattcataataattaaactgtctattatcggtttcatatttgttgctatttacataataacccctaaagaatactattaaaacagcccccattatctagtgattagataatagggactttttttttataaatgatataataaccctaaaaaagaagctggaaaggttaatctatggttcaacacaaatcgtgctgccaataaaagactctaacgtcttaaaaatggtacaagacaccttattagatagttttcgggcgggtcgccgtaactacactatctttcaagtcggcaaggccaccttgctgcgggtgagtgatgtgatgacgttaaagaaatccgatgtctataatccagatggctctgttaaacacacggcctttattcatgataaaaagactggtaaagcaaatacattatatttaaagcccgtgcaacaagacttgctgcaatatcatgattggctggtacaagaaaacattaattcggattggttatttccctcaacggcccattcagaccgtcacattactgagaagcagttttacaagattatggcacgcgttggtgatctattaggcatcaactatctaggtacacataccatgcgtaaaacaggtgcttatcgtgtttatacgcaatcaaattacaatatcggcttagtcatgcatttattgaatcactcaagtgaggccatgacgctcacttatcttggcttggatcaagcaagtcgagagactatgttagatcaaattgattttggttaaactaatgccctaactagactcaagcgatactttagtgacttatcaagctaaaatttgctaacatttgtattaaatatataagagataagagttgatcatatgcaattagtttacagggcagaagaaaatctgtccgtaaatctagcataagagcactattcttttagatagcgatgtggggattgacgatgacacttacgaagaagttcaaaaatctatcgaacaagttgctgcttcggcagcgggtggagtgacaggaggagctctagtctctgtatttgccgctctagttcctatcgcagggactattttaggaacaatgtcagtactcaattggaaaaaattattaaagtgaggtaattaaaatgggaaaccttggatggtatcaattaatgacaacagttgcaaaaaaggtaggcggtccaaagcaactccttgctcttgtggcagcaggtggctatgtaataattcgtggtgttgaagcaggtggtaagaaggtaaggaagctagttaagaaggataataaagaaaaatctacttcaaaagttctaccagcatacaaattcataatagacggtaaggatgacaaaggtcttatattttcttcaggggacgttttttatgtagcagcgagacatgatgatgttatattaatcgaaaaagaaaaggatgacaacaacccttattttgtaagcgttgattggttaatgaaagtaagttcttttaaggacaataattaatttcctatgtaaggctctgatgtcaagccaacaccagaatatcgccgttttgaatccaattcaagcctgcatcaatgtgtacgttgaaattcttagtcctttttacaatcgtttaagtattgatgttcgccaacgtcgtaatcacaagcagctaattgtctctgatttacagattttagcgttgatgatgtttcaaatcgaacgccgaactgtgtcacaacgtcaatttcaccgcgaaatggttacgtatgggattaaaattcctgaatgctcacgttttagccgtcgttgtcatgatctcgctaaggacatgaagacaattcgaaacgatatgcttcaacgttggacgcgtcatactgcatattccgtgattgatagtgcgcctatattgttgtgtgcaccagttagaaatatgcaggctaaggtttttcacgatgtcgcaaacattggcttcaacgctactaaacacctgcacttttacgggttcaagtttcattgtgtcatgacgaatgaaggctatgtggcgggctatgaagtaaccaaagcgtccatacatgatgttagagtcgcagaagaattgttagaacaagctagttcatcgcgagttttaactgacgttggttatctaagtaaagacttgaaacagcaactttcaacgaaaggtatcaatatttggacgccattgcgtaagaacatgaagcaaccggtgaacgttgatataacgctgttaaagagacagcgccgacatattgaaacgatgttcaataacttgaatacggttgccgcatttgaacatccgcatgttcgcacagcggttgggctcgaagccctaattgagatgatgcttttatggcacaccatcaaggttcacgacaatctcatgcatcacatcagcgggttgaaaatcgtgtagataacaggaacgttaataaactagcaccacgcgtagttaagtattaaattttgtgatctaatagaatttgtggagtaataaatagtttgggtgaagtgaaatggacatagaaaaaatcattgactacatgaatgataatgttcgatggggaagcgaaataaaacgaagcgcaataaatgaacttattgggcaatcccaaaatgatcttaatttttcatatcgaatatataaagaggcgtctgatatgaatttggtgatcattgaagatgagccttcgtctttaaagaatgttatacacaatgcgggtttatcttggcaggatgacatgaaaaatttgcttcaaggattacctgaagaatttacattatcggatgtatatttatttgaccgtgatttaggacagatacatagtgaaaatcaaaatgttagggctaagattagacaagttttgcagcaattgagagacaaaggagaaataacatttgtctctgatggtgtctatcgaaaggccaaaattcaaagcaaatcagatagcgggcacttgcttgataatgtgatttctgaagatcccgattattttgacgatttcgatgactttgaagaccttgatgatgttttgagttcagaaaaatttgatgatcagtataagaatgtcgcagaaacacctgatttttctaataattcaaattacattgacgaatatcaaaaatcagacagcacacgggcgctagactcattgatgagggcaaatgagaaattagtggcaagtatagccaaaaaatatacaggacaaacaacggctagttatgactttgatgacatgattgtagaaggtatgctggggctgaagagggctgcagaaaaattcgattcatcattgggatatgaattttcgacttatgcaacctggtggattagacaagctattactcgtggtatagccgatcagtcaacaatagtcagactgcctgttcacatgagagaagtgcttaataaagagcgcaatgccgaaaataagttattcaaagacctatcacgaccggcaactgatgatgaggttgcggcgtttatgaacattgatgtggataaggttgttggttataaaaaagttcaatatagatttggaagcaatcttgtgtccttggatttaccggttggttctgccgaaagtgatacaactttgggtgagctaattccagaggatgatgtaaaaagcgaatttgacatagtgtcagataatgagcttagtaagaggttgaacgagctactgcttgaattgacagatcgagagcgtgaagtgataataatgcgatttggattagaaaactcgagtattcatactttggaacaggtaggtcaaaaaatgggagtgactcgagaaagaataagacagattgaagggaaggcgcttcgacgattaagaaatccagtaaatgcaaaacaaattaaagattggattgaagtggaagagtagcgtggagagaatggattattatggatcttaataacagaattgaaagtatcatcagtgaaaataatttagacaccccattggtaatattggttggatttggtcaggaaagttttgacaattggttcattactcctattgatcaaaagctcgatctaattgatttggatgatagaaaagctaaggtatttagtgaagccatggcaagtatggctaaaggtttgccttactatatagttcgacctgaagaatttagtttaatatcagaacttgtgggtgttatgtatcctaaggataaagttgtcattaagaatgatttgttcgatactaagtacccttacgatgattctttatcagatgttcagaaagcatatgaaatgctttatttgagtgaagatacagaaatagaaggaacagacaaacttaaggttgaacgaattaataccttttacggcgggatagactattctaaaaagtcaaacgaatattatatatcatataaaacggatttgtgggatgggtacccggtatttgatatcagtggattggaaaatgacgttgttcctcagttggtttctaatccaacggccgatattacgatggctctggatgaagaagagacggcgtttttggattttgaaattgaacaagattattctaactctgttaactttgtgattgaatcgttggatcagatcccgcatcgatatattcaccgtatttctgtaatgaaggagttacatccggactgggaagtttacttttctacacaatcaataaaacgaaatgacattgagagacttaatgaatatcgacagatacttaaaaaagtttgggggtatgatgacttcagagacctagaaatgtatgccacgattgagaagagagataagaagttaattaaaatatcacaagctcaaattatagatgatatcgtacaacaggctgagcaggcccgagggggtaatgactatcgtgatgtgtatatcactgcatcaactggggcaggaaaatcagtgatgtttcaggtaccaacactatacttaactgaaaaatatcaagatgataagccattagtgctagtaatatcgccgcttattggtttgatgaatgaccaagtcgatagcatgaaagcaaaaggcgttgaaaatgcagagacaataaatggtaatactcctccgtatgaaaaacagaacattttacaaaaagtagcagatggaactgttgacatgctgtacctctcacctgaaacgcttcaggcaagaggtgatattaagatgttaattggcgatcgaaaaattggaatggtgattgtcgatgaagcccacattgtaacaacgtggggaaaatcattcagagcggactattggtatttgggtatatatcttcaaaaactgcgtaaagaatttcagtttccgattgttacatttactgctactgctatttatggtggtagagaagacatgtacatggatacacgcaatagtctgaatatggtccggccgattgcttatttcggtgtggttcgacgaaacgatatttttatgaaggtatcatcatccgccgacgataaggatagagactatcgtaagacgaagaacgttcttgccttaaagtatctgcaaaatgcttcaaagagaggacaaaaatcgttaatgtactttcctacgatatctttgttgaacggattttaccaattcgtcgaaacaaatgcacctagtatagccaaggttactggccgatattacggtacgctcactaaggaagagaaggatgccgttttagatgagtataaaactggagaaattcaatttgttctcgcaacaaaagcttttggaatgggaattgatattccagacattacaaatgtttatcactttaatccaaccgggaatgttgttgattacattcaggaaataggacgagttgcaagaaatcatcaactcgtgcccaggggatttggcgttttggattttctgcctcaagatttgaacgcggtaaagaaattgcagggaatgagcgcgattagaaaaaatcaaattcaagccgtgatgcaaaaagttctagatatataccgggcaaaaggaaataatcgtaatattgtcgtgaatgctgatgactttaagtatatcttctcggataacttggacgatgataacaacaatttagacaacaaagttaaaacggtattgctgatgattgaaaaagatttttcctcaagccgtaagctgggttactctccattcgttgcaagaccgagaagtatttttggtaaggaattaatcttagctactaaagaggttcagaacacgcttgaaagttcttcgttgcgtaattatgtggaatacgtcgcgtcactccatggaggaaactatgcttctgtattgtccatagatctttcaggtatttgggaggaccattataagaaaatgtcgtttcctgagtttaagtacaaattaaacacacctgatgagcgtgaaaaattacgccattcgaagttgtttagtctgtttgtgttcgcgagcggtgttcaatatgagttcgatgatcaaaatagtacaaaacaggctaagtataaatcaattatggaaacttacttacgatttttagatactaaacaacgaactaacaaacaatttgatgctaaagagttaggcgaattcgttagaaacaacttacgtattagcgacccctttaaagcaagaagcttagcgcaagttcttatcaatgcaacttttgagtatcaaaaactcaaagatgtgaaagttttgaaagagcgagttgtcggggagaagactcgctttggggttatcagatctggagacattttttatgattttgttagtggagttactaataggatatatcatcccaagtacagttactttgaggatgaaggctcaatgaatatattccactataggaattctgaagaattttctgaagaaatgatagttttgggaattggagaagcttttgaattaggaagctacacaactctcggcggatataatcctcaaatatacattcgaattaattcggtttatccagtagaacaggccattaaagcagatcaaaaatacagaaactttatactagaagatgtaatgttgaagcatcgaattggcgtacttatgcagcgtttcttatttactcacaaagaaaatggcaattctgggaaagaactcgtagaaaaatatacggattggttctgggatcaaatagaagattattttatgggaaagttacctgaagaagttgaaactgagctttttcaaaaaaagtctagagcagatgaatagtgttagttgcagcgaaccattgtggttcgctttttttgtccaaggttagttaagatgaaatttttcatacaatactgctaaaatgaatacaaacatatgacgtgagaggtattcagtatgaagaaacgaatagcagttgttggggcggcaattatcgaaaataataaattgttggcagctaagcgttcagagggacgatcataatatataaatttaattagatcacattatttacaagttcgctacgaaaaagcaaacatagtcataatatggacgattttatgtggtgaaaataacccctagcgcgtaatacattgatagttttttgtagcgccataatcacacttctttttatctggcaaattctataattaatccgaacagaaattaaaaagcccaaagcaatcacttacaatggtagtagctaattccaaccaatatagggagtaattactttggtttttttattaagcggaagttggtgcaaccaaaaagcacgtttagatgttcaaaatagaacagcaaaaaagctgaggttgaagtatttcttcaacctcagcttttttatttttgtctagtccgatcaatttcagtccgaatggctttgaaactttgttctgtttgtgggccattattaacggcgaccatcataaacagactatcgacgatgctgatttgtgcaattaacgcgtgtagtgcttcggcgcggtaattggtttcttcggaaatggacaacagtgtcacatcacccaatttagcgagggttgaattgccaaaactggtgatgacaatcagtggaacgtgacgttcttttaagatgcgtgcaatttctaaagcatctttattttgaccactatgtgaaataatcagcgcacagtcttgttcggtgagttgggtggcctgcatcaattgtagatggtagtcttggctgtaaacagttggaatcgcagttcgtaaaaatttgtggtagccatcttgagcgacgattccagaagcgcccaagccaaataaacttaagcgcttggcctggttgatataatcaacggcttgccgtaattgcgcttcagtcagtagtgaacgagttgctttgagcgcattagtattggatgcgaaaattttatcggccatggtcagatagtcatcattattactaatttcatggaagagtggattatctgttggggttgcttgtttagcaagtaacgccattttgagtgcctggaagtttgcgaaggtcaacattttggcgaaacgggaaatagtggctgttgaaacaccacagtcagccgcaaattcttgaatcgttaaactttgattgaaatgttcagtttttaagatgtaatctgcgatttgtttgtatttttcacttaaattcgtgtagtacgcacggagtaaggaatcgatgttttgtgtcattgaagtgcccccctgttatcgatagtatagcataaaaaacaacaaagaaaattattttctcaaaaagggttgattaaagaaaataatttacatataatgaagacattaataaaagtgacatgaaattgtggataaggggactagcaaagatgaaattagcaatgattggtttaggcaaaatggggattaacttggtcgctaacttacgacgtaatgggcacgaggttgtcgcctttgacttaaatgaagcagcggttcaagaagcaacccgcttaggtgcattacctgcaaaggatattgatgatgtggtggcacaattgccacaacctaaaattgtgtggagcatgttacctgctggtaagccaacacaagccacaatcgaaacgttaagtaccaaattgacagccggtgacattgtcattgatggtggtaattcatttttcgaagattctaaacaacacaatgcattgcttgccgcaaaagggattcatttcttcgatgtcggaacttctggtgggatgagcggtgctaacgcagacggaaacttcatgatcggcggtgacagcgcggaagtcttcaaacagattgaaccgatttttaaagatattgctcaaaaagatggctatctctataccgggaaggctggtagtggtcattatctcaaaatggtgcataatggaattgaatacggcatgatgcaatctatcgctgaaggattcgatgtgttatcacatggtgagtttgaatatgataacgaagcggttgctaaggtttggagtaatggttctgtgattcgcggctggttgatggaattagcggaatctgcttttgcaaaagaccctaacttagaaggcttaaaaggtatcatgcactcatcaggtgaaggaaaatggacattagatgaagccttgaaattacaagtcccaacaccggtcattggtttatcattgatgatgcggtatcgttcacttgaagatgatacattcactggtaaagttgtcgctgctttacgaaatgaattcggcggccatgcagttgataagaaataagtggtatcctagtaagtagtcagtaaacaccacataaacgaggtaattatgatgaaatatatgattggtgcggatattggaacaacaagtacgaaagcggttttatatgatttaaaagggaatgttaaagcttacgcaaacgttggttatcctttatatcaaaccgtacccgatatggcagaagaagatccggatgaaatttttaatgcagtgtcagaagtattacgacaggtgatgcgcaagggcaacgttcaagccggcgaattacagggcgttagtttctcggctgcgatgcacagcttgattctgatggatgcaaatgatcaaccgctaactcgggcaattacttgggcggataatagagctgctaaagcaagtcaacaattgaaagaaaatgggttgggccaagccatttatcaacacactggcacaccaatccatccgatggcgccactttcaaaactgatttggctgaaagaagcgcaacctgaattgttcaaccaagctagtcaattcatcgatattaaaacgtatgtcttccaaaaacttttccatacgtatcaaatggattattcaatcgcttcagcaaccggcttgttcaacatttttaatttagattgggatcaacaagcccttgaagtggctggtgtcacacgccaacaactacctgaattagtcgaaccaacggattatgttaaagggattgatccgatctatggtgaattaaccggcattggtgctgaagtaccatttatctttggcgccagcgatggggttttatcaaaccttggggtaaatgcaattgatccaggcgtagtcgccgttactatcgggacaagcggtgccgtgcgagtggttgttgatcatccagtggttgatccaaacggtaaattattctgttacgccttaaccaaggataaatgggtggtcggtggaccagtcaataacgggggaattgtcttccgttgggtgcgcgatcaactttttgcacctgaaaaaatcaaggctgaacaaatgcatgtttcaacatacgatattttgacacaaattgcggcagaaattccggctggttcagatggactcttattccatccttacttgggtggcgaacgggcaccaatctgggatgcagatgcacgtggatcatacttcggtttgacgcggcaacatacgcgggcgcacatggtgcgtgcagcgcttgaaggcatcgtttataacttatacatggtgatgctgatgattgaaggtgtggcaggtaaaccaaagagtattcaggcaacgggtggcttctcccgttcagaattatggcgcccaatgttggcggatgtctttgaacaagacgtcacgattccagagagtttcgaaagctcatgtttaggtgctgctgtcttagggatgtatagtttaggcttagtggatgatctatcagctgtcaaagaaatggttggtgtgacgaatgtgcatcatccagaagaagccaactttgaagtttatcgcgaactattaccaatctggattcgattaacacgggaattaaatacggaatacggcgcaattgctgacttccaacgcaaacatatgcaagttaaagagtaacgaagtgaactgggtctgaaagcccagttacttttaacaatatcatgatagcgcaaacattattgaaaatagggaaaattatggcattagtagtcctattattgggcattatcttattactcgcccttattattcgatttaagatcaatacgtttatcgctttagttataacggcaatggccgttggggttggcctaggtatgccattaacggacattgcaaccagtgttcaaaacgggattggcggtcaacttggtgagctctcaattgtctttggctttggtgccatgatggggcggttagttgccgacgctggtggcgcgtttagaatcgcgcataccttaatcgatatgttcggtaaaaaagacttcaaattgcaattatgttggcttcgttcatcattgggattgccttattctttgaagttgggatggtcttgttagtaccaatcgttttcgcgattgcaatcgaagtaagtgtgtcaattttgtaccttggaattccgatggctgcagcactttctgtcacacatgggttcttgccaccccatccagcaccaacagcaattacctcagctttaggggcaaatgctggtcacgtattgttatatggggtcttaattgcgatcccttcagtgattattgccggtccattattcactaagattgcaaaacgcctagtaccagatgcgttcgcgcgccaaggtaatctgacggcacttgggcctcagaaaacctttaaattagacgaaacaccggggtttggaattagtgtcataacctcattattcccagtcattttgatggctgtcaccacgatttatcaaatggcctttaacggcgggaaattacctaaaaatccaacgatgctggattcaatcgtcggttttatcgggacaccagccattgcaatgaccatttcattgatggttgcgatgtatacgatgggttgggcgcgtcggattaaaaccctagcgattatgaagacgattgaagaagccgttaaatcaatcgcgatgtcactcctagtcattggtgggggtggtgcgtttaaacaaatcctcatcgacggtggggttggcgatagtgtcactaaattattcgcaaatgccaatttatcaccactattattaggttggttaatcgcagttgtcttacgggtggcattgggttcagcaactgttgcgtcattgacggcggcaggcttggtcttaccactaatgcaatcagccggtgtgaaccctgcactgatggtcctttcaattggagccggcagtttagcggcttcccacgtgaatgatgccgggttctggatgttcaaggaatactttgatttaagtgtcaaagaaacccttgcaacttggacagttttggaaacattgatttcgattgttgggttaattggcgttttactattaagtttagtcgtctaaataaaagttaaatgacgttggctgttaaagacagtcaacgtcatttttaatagcacttaaggtgggcaattatttgtaatcggttacctaaaaaaacgctgagaaacagcttttttttaatcttgttcagggacaacatcaaagagatatgatagaatgggtaaggattaatttgaacactggagacgatcagagttaggtcatcctaaaatcaaagtcattgaatcctaatagttgaacgactcaatcgaagagaaagaggtacttatatggataagaagcagcgagaagattcacaaaagggtgaacttaatcaacaaaagcatgagaaattcatacactatgctgatggcacgagtcttgaagaaattaataacacggttgcgattcccaagaacgctggtttttggcggacgttgatggcctttatgggacctggtgcgttagtggccgttggttatatggatccagggaactggatcacgtcaatcgccggtggtgcgcaatacgcatacaccttgatcagtgtgatcctagtatcaaacttaattgcgatgttattacaagcaatggcagcgcgtttaggaattgtgaccggaatggatttagcgcagatgacgcgggccaaaaccggtaaaaagatggggattttcctctggattgtcaccgaattagcaattatggcgaccgacatcgccgaaattattggttccgcaattgcgttagaactgattttcaacatcccattgctctggggtgtcttaattaccgcatttgacgtcttgctattattactattaatgaaacttggtttccggaagatcgaagcgattgtcgcaaccttggtggccgttattttattcgttttcttatacgaagtgattctagcgcaaccaaatatgggcgacgtaatgcgcggatttgtaccaagtacacggattgttaccaaccagaagatgctattcttggcattagggattgtcggggcaactgttatgccgcataatctctacttgcattcgtcaatcgcacaagcacgtcaatatgaccgtgacgattacgccgaaaagaagaaagcaatcaagtttacagtcattgattcaaacattcaattatcagtcgcatttatcgttaactgtttactcttagttttaggggcagcaatgttctttggaactaacagtgatttaggacgattcgttgacttattcaatgctttacaaaacaaagaaattgttgggagcattgctagcccaatgttgagtttactctttgccgttgctttattagcttctggtcaaaattcaaccatcacagggacactttcaggacaaatcgtcatggaaggtttcgttcgcatgaagattccattgtgggcacgacgggtgattacccgtgggttatcaatcttacctgttattattttcacggtttactaccatgggaacgaagcacaagttgaaaacctcttgatttactcacaagtcttcttgagtgttgcattgccagtctcgatgattccattgacaatgttcacgagtgatgaaaaaatcatgggcccattcgttaaccgcccttgggtgaaatatacggcatggtttgtcacaattgtgttgacgcttttaaatatctatttgattctacaaacaatcggcctagttggctaatgaataggtgctcgttaatccgtaaattgatatggattgacgagcgctttttttgttcggtatgctagactagagataaggtattattttggagggattttattgtttgaagtaacgagtgtgcatatcattattcgactgctactggcaaccttaattgctgggattatcggatctgatcgggaatataagaaccgcccagccggaatgcggacacacattctggtctgcattggtgcgtgtgtgattgcgatgattcagcaggaaatcgcagcgcaaaacgttcaatttgcattagcgcatagtgcgattagtaccactattcgttctgatcaagcgcggctgattgcacaagttgtcagtgggattggttttttaggagctggaacgattattgtcacccgccacaagattcaaggattgacgacggcggcctcactttgggctactgcgggattaggacttgcaattgggatgggctactatcaaattgcggtgatcagtgcggtctttgtcattttcgtgattgtcttcttgaaaaagattattcacatcaatacgttgaaaaaaatcgaaattaagtataagcataaattggaaaccaaggagtttattcagagctattttgaacaacatcagattcaaattcgcgatgtgaacttctcagtaacgcaaaacgaacgtgatacgatttacactaacgtctatcgcatcgaaattccccgggaaatgcaatatgcagaaattgtggaagatatctcgatgaataagaacatcatgacgattcgaatggtcagtgtctaaaagagtgcgcaagcaggcgtttatatttcgagtattaactggatttgtctgcaatcgccgatgcgacaagtttggttaagcacaggaatatgcctgctggagcacgtttaaaaaaagtgtgctgtctcaatcgggaaatacatttacgaaaaaagaagccccctgataaaaaagtttatcagggggcttctttttatttcagtctaattaaacgcaatttgtctgtctcttggtaagattaagttgagaataattgcggcaagcgcacaaatcgaaattggtgattcaagtaagtattggatcatttgaggcgttgctttcaccaatgattgtggcatgatgatgatggcgatacatagaatgattggaattccgatgatgtacatatcacgttcttgggtgtgtagtgtgcgaataacatttaacccgttgagcatgatagttgaacaaatgatggcgaaaatcccaccaataactggggctggaatcgctgataagaaggccgctaatttattaaagaagccgaagatgataaaccaaatcccggcagaaacgaatacttttttactagcaacaccggtgattgaaataatgccggcgttagttgcataccctgtaactggtgagccgcctaagagtgcagcgattaaacagctaattccttcaccgataatcccgtgattccattgtttcttactgatgggcgaatccgtaacggcactcattgcaaaccaagtcccggtcgtttcggtcattaaaacggcgtagataatgacgaaggtcatgattgctgtcatcgaaaagtgcataccatagtggaatgcggtgaaacttggcaagctaaaccaactcgcttcgttcacactttgccagtcaaatttaccaagcatggttgctaaaacagttccgcctaataaggcgatgatgatggaactaactttgaagagtttttgtaatttagggaagtagatacctagcgaaacacaaagaattagaatggcgacggtcacaacagccaggagtaagttctcattgatattgccctgtgctttgaaaatgttatcacctaaagcagatggcatcagtgaaagaccaacgatggtgatgattgtgccaccgacgacttgggggactaagctgttaataattttttggaagaggccggtgacgccgagaagaattaacagaattgaaccgacaattgaagcgccaatcaccgttgccatcccgccgtctttagcaccactagcaaagtaaatcccggcgattgccccaattggaacaaatgaagggccttgggaaacaggcattttcataaaaaatttggtttgaagaatcgtaccaatcccggcagcaaggaatgtcgcttgaattaagccggcttttgcatcaagacccatcgccaataaaccggcaatgataacggggggaacgtagacatccattgctaaaacgtgttgtagtcctaagaagccagcttcttgattcgaaatcggctcgtcaggaccgaccattaatttttgagattgttcattcataccagttgtgctccttttcgtggaccagtttaccttgaacgtagacggccttaatttggtgtttggtgtggcggaataaaagttgttcgagttgttcatctggtgtaagacttgcaaagcgtggtggcgcttgaacgatttggaaatcagcaagcaatcccgattcaatggcaccagcttgaatgccaagactagttgcaccaccgacggttgccatataaaaagcttgtttagcactgatccgactgttcgcaacaccgcgttggtcagccgcaatggtggcgtcaaccccgtcttgtcgaatttgggaggccgttacggcttgttgcaaattggcatataagctaggggtataaccaccggcgatatcactgccaagcccaattttaatgccttgattaagtaactcgtgtgcggggagaatcccgttaccaaaataggcatttgagatagggcagtgcgcaatcgctgcttgttcggttttaatgatactttggtcagtagttgtcagttgtgttgcatgtgctaataccgaatgttgattcaataatccgaatgattgcaacatctcagagtctgtatggccgtaacgttcgcgtacataatcgtgttcccagtcgctttcgctgcagtgtgtctgaacggtgatgtgttgggactgtgcaagttgaccgagttgctgaagtgtttcagttgtgcaactagggatgaagcggggggtaatgacgggttgaatgaacccattacgataggtatcttgaattgcttgaacaaaagtttgtgttttattaatggcttcttcaggagaagcatcacgataatagtctggtgtttgatctggattatccatcgcaacagttccgatgaaagcccgttgccctgcttgggaacaaatttctgcgagtcgtagattcgcagaattgtgaattgttccgaaatatagggcggttgttgtgccgttagcgagcatttcggtcactaagtcttgatacacaggtgtggcgaaatctaaatcggcgtagcgcgcttcaagaggaaaggtataatgattgagccaatcagctaaagggcgatcaagggcaattccagcttgtggccattgtggcgcatgattgtgtagatcgataaagcctggtaacaagaagtgtccgggagcgagtgtgattaagtggtcatgttggcgcgcagctgataatcgctcagagtattctgacgccgtttgatgaataatgtttgtgatttgaccattatcactgatttctatcagtgaatattcgtgaaatgaactataatttggtgaatttgcagaaaaataacttgcttttagtgtgattggcaaacttttaaacctctccttctagatggtgtgttgtaagtatatcacataccataatgcttttaaactttaaaatcgttcgccttttgattcatttctaagggatgctttcagaaaacgacacgtgagcaaaaaggtaccctaaaaaatagcagactgctagaatgaacttaaataagctagttgaaaggatgaatcacatgagtttagcagatgaatttgtagaacggcgttttattgtctttcaatgctataagtgccaacatccagcgatggaaatcacgacgaagacagcactagaagataattcagatggctctaccaagtttcaaattgaaacaacttgcccacggtgtcaagcaaccgatcaatttgttatcaataacggtcaagaaggggaaattagcgcgagtgtcaatagtggcaaagtcgctaaggttgccaacattaaataaggcaatcgacgttcgctaaaagtgaacgtctttttttgtggcgtaaattgtatataattatgaatacatgaataaaaaggctggaaacggttgatttattcaaatataattgacattatgccctttgaattgtatatttattctacttaatacaattataaaggacttattgaaatggcgaaatcaaaaaaaattaacgttcaaggtctcgtattgatgatttttgggtcaatcttcggctttgcgaataccacaattgctttctacttaatgggctatgccagcattatttggtatatcttagcggcaattttctttttcttaccaacttcattaatgtttgctgaatttggttcttctttgaaagaatcacgcgggggcatctattcttggttagaagcatccattggtaaaaaggcggctttcatcgggacgttcatctggttagcgtcatggattgtctggatggtgtcaacagctgctaaagtgtgggtgccgttttcaacgttcctccaaggttcagatcaaacagcaacctggcatttattagggatgaatggcactcaagtggtcggtgtcttaggaattctttggattttattattaactttcctatcaagtcgtgggattgataagattcaaaagtttgcgtcattcagtgggatggccgttgcctttttattcgccgcattcttagtgattagtgtggcgatttggtttaaaacgggttttcatttggcagaaccgattcatgggacgacgacctttgttaagagtccgatgagtagctatcaaacaccaattgggatgttatcatttgttgtcttctcaatctttgcttacgcggggatggaagccatgggcggtgttaccgatagtatggatcagcctgaaaagactttccctaaagggttaatgattgcgacagtcttcattacattaatctacgcggttgcaatctttatgtggggcatctcaacgaactggcaacaagtcttgagcgggaataaagctaacatgggcaatattacttatgttcttatgcaaaacttgggttatcaattcggccatgcctttgggatgacgacacccgttgcgatgacgattggaacaacctttgctcggattaccggtttaatcatgtttatcagttacttaggcgcatttgccgtcttgatttattcaccattaaagtcatttgtactcgggacacctaaagcactctggccgaacggctttgcagaagttaacaagcatggcatgcctgaaaaagcaatgtgggcgcaagcattattagtctgcattttaatcgcggttatttcatttggtggtaaagctgccggtgacttctataatgtcttgactttgatgtctaacgtttcaacatcgttgccatacctctttttagtgactgcctttccatatttcaaggcacgcaaagatttggaacggccttacgaattctttaaatcaccagttgctgttaaggcggtgacgattgtggtcgacttagtccttgtcttcggaattgcctttacgattattcaaccgatgttagaaggtcaatatttagatgccttctggatggtcattggtccgattgtctttacgattatggcccttgctttgtatcatcgctatcaacgaaaagcagtacatggctaaattttttaaaagcgttgaccgatttggtcaacgctttttttgatggcctaattaagggcttgtgaattttaaaagggattaattctcatttaattttaatgtacaaaggaaaatagttgcattttcagattggttccgttttagaactaatctgatttttaaagactaacataaagccccatctagcgattttttaatttttaaagaaagttggttacctaactatcacattagaataaaatgagaataaaagtggacggtgtgcaactttcacaataaacctgtatactttttagatatagttttcagaaaatgaaatcaaagggggattctatgactgtcaaattacaagtcaaaaatctaacaaaaatatttggtaagcgcgtgccgcgtgccaaagaattactgaaacaaggaaaatcaaaagcagcgattctaaaggaaacaggtgcgacaatcggtgtcgaccgggctaacttcgaagtagaatctggcgagatttttgtcattatgggactatctgggagtggtaaatcaacattggttcggatgatcaaccggttgattgagcctactgaaggtagtgtattaatcgatggcgaggatttaatgcagattgataagaaggcattacgtgaagtccggcgtaaaaagatgagcatggtattccaaaattttgggctctttccaaatcgaacgattcttgaaaatacagactatgggcttgaaattcaaggcattgataaggcgacacgggaacaaaaagcgaatgaagcactcgatttagttggtttaaatggttatggcgatcagtatccgacacaattatctggtgggatgcaacaacgggttggtttagcgcgtgcattagcgaatgatgctgagattttattaatggacgaagctttttctgcgcttgatccattgaatcgttctgacatgcaagaccaactactcgacttgcaagaaacgatgcacaaaacaattatctttattagtcatgatttaaatgaagcgctcaaaatcggcgaccacatcatgatcatgaaggatggggaaatcgttcaaaccgggacaccggaagatatcttgacacggcctgctgacgagtatgtagagaaattcatcgaaaacgttgatcgtagtaaagtttacacggccggcaacgttatgattcgcccaacgactgttaatattgaaaaagatggccctcgtttggccttaaaacgaatgcgtgaaaatgaagtttctaatgcttacgttgtcaacagtaaacgtgagttagttgggattattgatgcgcgtgatgtacttgagttagtccgcaaagaaagtcgtgatttgcaatcaatcgtgaatactgaagttccaacaaccgatgaagagacaccaattgctgatatcttagatgatatttcgcaaacgggcattccgtttgctgtcttaaatgataagcaacaattacgtgggattattattcgcggggccgtcttaggggcacttgcaggaaacgaggtgaaccattttgcttaatttaatgacgattgctaaattaccaattgccaattggatggatcactttgtcgattggctgacacaatttactggcttttttaatggtttaacgaattttattggcggaattatcaacgctttccaatgggtgtttgatttaatccccatctggttattcatcgtgattatcgctggcgtcacttatttagcgaatcgcgacaccaaaaaatggggtttaattatctttgaagtcctcggcctactcttgatttggaaccttgatttctggcgggatatgacgcaaacgttaacgttagtgttaacctcgagtctgatttccctcgtaattggggtgccacttggaatttggatggccaaaagcgatattgcccaggcaatatttaaacccatcttagatttcatgcagacaatgccggcatttgtttacttaattccagccgttgccttctttggtatcgggatggtcccgggcgttttcgcatcagtgatttttgccatgccaccaacggttcgtatgacaaaccttgggattcgccaagtgccaaccgaattgatcgaagcctctgattcatatggctcaactgaatggcaaaagttaattaaggttcaattaccattggcgaaatcgaccttaatggctggggttaaccaaagtatgatgttggccttatcaatggtcgtgattgcgtcaatgattggagcaatgggcttaggaacacgagtttactttgctgttggccggaacgatgctgggggcggttttgcagccggcttggcaatcgtaatcttagcgattattattgatcgtttaacccaagctttgaaccggcaacgtaaacattaaggagggattcagtgattaagaagaataaattaatagcttttttcaccttagtggggctcgtcacacttctaacggcctgcagttcgcaaactaagccgtacgctaccgatgagaaattaggcggtcaaattaattacacgattaccggaattgacgcgggtgctgggattatggcatccacacaaactgcaattaacaagtatcatttgaatgatcagaactggcagttgcaaaccagctcaactgcggcaatgaccagtacgttagacaaagcgattgcggataaacgcccaatcgtcattactggttggcaaccacattggatgtttactaaatatccaatcaagtttttaaaagaccccaaaaatgtttttggtcaagctgaacacattaatacggttgttcgtaaggggctaaagaaggatatgccagaagcatataccatcttagatcgattccattggacgccaaaggaaatgtcgaccgtaatgcttaaagtcaatgacggtgttgaacctgaaaaggcggcgcgcgattggattcaagacaatccagaaaaagttgctgagtggactaagggtgttaaaaaggttcatggcacgaaaattaagttaacctatgtggcttgggattcagaaatcgcgtcaactaacgtggtggctgaagttttacgtcaacaaggttatcaaccaacgattcaagctatggaaattcaaccgatgtgggcgtcagtcgcaactaaagcagccgatgcacaagtttccgcatggttaccgaagacctctggtttatactacaaggattacaaaggtcagattgaagacttaggtccgaacttagagggtgctaaggtcggtttagctgtaccgaagtatatgacgaatattaattcgattgaagatttgaaaacaaaatagaatcaaacagcgtatgcgatctgttcagatagaacatggttagatgatcaaatttcggctgttgaaagagtcggttagggcaaaagttacttttgttccaaccgactctttttttatttgttagacattctctgttagaataggactattgaatgttatcggaggcggaatagatgtctgttaaggcgtttttagattttatcgaattacgcactaaagttggtagcgtgattccctttatggctgggttcttttttacgttgtattatttccaccaaattgatccgatcaataccgtgttgtacttctgtgcattggtgttaattgatgtcttcacaacgggatggaataattacaacgactttcacctcgctaaaaatgaaacgctccagcaatcaaccagtgcattaggacgacaagatattgcccctaaggttgctttacgctggttgatcggctttataagtacggcaaccgttctggggctgattctggtctggcgcacaaatttaattgtgttagccatcagtgttctgttcatcttaatcgggattttatatacttacggcccattcccaatttcacgattaccactgggtgagttgttatcgagtctggtattagggttcggtaatttctttttgacggtgtatgtcaacgttccggcggatcagttggtcgatttgcgctttgatgggccgttaatgttattccaactgaattggctgaatgtgattttggtgtttgtggcgagtttaccaactgtcttcctgattgctaatttgatgttaatgaacaatatttgtgattacacagtcgatttagagaatgggcggcacacattaatcagttacattggtcaaaagcgcggcattcaactttatcaacttagtgcgtatagttgttacgtggtgattattgttgggattggcctgaaattatatccatggccagcagcgctagcttttgcgagtggcccaactttgttacgtaatgggtttgcattacagaagagtcaggaaaaacgcgttgtatttggtacagcggttcagaatctaattgtctttaacggtttttggctagtgggaatgttgattggcctctatctttaaatgaaaagtcactgcggtggcttttttatttcaaaaaaagtattgattgtatatacaattttgattataccgtgattattaaaacgcttacatgtggagatgagagttatgacatatgcaatgattgggacttggcgaatggcctttgaagggattcaaaaagcgatggctgatttaaaaaatggtgggcaaagtacggatgcaattaaaaccgctatcaaaaaagtggaagattaccccttctttaaatcggtcagttacggtggtttgccaaatgcgcaaggcttagtggagatggatgcggcattcatggatggcaacacttttgcaattggtgctgttgcaggaattagtgatgtgaagaacccaatctcagttgcgcgtcaattaagtgacgatcattttaatagtttcttggttggtgcgggagcgtcacaatatgcgatgtttaacggttttgaaagccgtaatatgttgaccgaacgcgcacacaaaatctggatgcaacgaattaaagaaattaacgaaaaaaatcttagcccatatgatggtcacgatacagttggcatggttagtttggatcaagctgccggtatggcagcggggacgtcaacttctggattatttatgaaaaaaccagggcggactggtgattctgcattatctggcagtggcttttacgtggatagcgaaatcggtggcgcaaccgctactgggttaggcgaagatttaatgaagggctgtctttcatatgagattgtgcgcctgatggggaccggtttatcaccacaagcagcgtgtgatcaagcagtctatccgtttgttgagaaattaaaaaaacgctacggcaaagctggcgagttttcgttggttgccttaaataatcaaggtgaatggggcgtggcgacgaacgttgagtttacgtttgcagctggcaatcaagatgcggcaccacaaatttttatggctaatccagggccaagtcaaacgatggtgatcgaacccatttcagcagaatggcttgaagcctacgcgaaacggattaaagcaccagttgaatagaggaagtggttggaatggttaagtatctatacgttgaaattgcagaagccttacgagatgacattcaaaaaggggtctatgggatccatcagaaattaccatcggaaacggatttagccaatcaattttcaacgacgcggctaacaattcgcaaagcaatcgatctattggttaaacaacatgtcgtggtacgcgatcgaaatcgtggcacctatgtacttgcaacacaaagtaaaatttcgagtggttcatctggtttagttggttttaccgaagcagccaaacagtttcaattggatgtcagcacgcgggtgttagatttacgccggacaatcgtttatccggactatgtggcctccaagttagatttagcaccacaggagccagtttggcagattgaacgcttgcgaatggcagacggtgaagcgatgacccacgaacaaatctatctgaaacaaaaaattctaccagaattaacggcccatgaggcacaagggtcactctaccgcttgattgagcaaacaatcccaatcgggtatgccaatcaagaactcgaagcagtcgtattggaaaaaggcttaagtgacttacttgagacctctccagggcaacccgcttttctagcccacacggttgcgtattcaatggacggttatccaattctttatgataactcgcattatcgtgctgataaatacacgttccataacatcttgcaacgtgaacattaaaaggagggttttaaatgaaagtaattgtcttgttggatcaaatccaagctggattaggtggtaaggaaaaaggggatacccctttaggtggaaaaaaattagcgatgggtgctgcggatacgctcgataaggcattaaaaaaaatggactctgaaattatcgggaccttttattgcggaactgattattatcaggcgaacaaagccgaagtgaatcggaaagttgcgaagatgagtgagaaaatgggtgcagacgttgtgattgcgggaccgacctatgattatcgggacttttcgacgatggcgtgtgaattagcagccactattcaaaaagaaacaacaattccggttgttgggctgaccgcgatcgaaaagaatgccgatttaattcaacagtatcaaggtcaaataacgattgtgaagatgccaaaaaagggtggtactggtctttcggattcaatcgaccacgcattgcagttatgcaaaatgaaggttaaaggcgctgattttactgattttattaaccaatattgttattaaaaggaggcaaaaccgatgcaaaagaaactcgaacagattttgatgccggttgcgattaaactggggaataatgttgtactccgatcattgcgagatggtttcttaatcattacgccattgattatcgtgacatcgattttcttactgattgggaattttccaattcctggttggactgaattttggagtgggattttagggccgcactggacagaatggtttagtgctgtttctaatttagtgtttagttttacagggttgcttgcttgttttgggatatcctatgcctatggtaaaaaccgagggttacaagcgattcataccagtgcaattgctattatttcattcttaattttgacaccgactgttgtcaccgttggtaaaaaatcaatcggtgccattcaaacaatgtatttgggacctaacgggattttcctagggatttttatcgcattagtcagtgttgaaatttaccgttttgcgattaaacgcaactggcgaattaagatgccagatggtgtgccacctgcagttagtgaatcattcgatgccttactaccggctggcttagtggtattagttttcttcttaattcgaattggttttagcctttcgagtttcgaaacggcctacaatttcatctacacgttactgcaacaaccgttaaaaggtgccggcaactcattgccatctgtattgctttataacttcatcgcaatgttgctctggtgttttgggattaatggtccaactatcaccaacagtgtgtggtcaccaattttcttcgttctgacgcaagataacttaacagcattccagaatcatacgcagttaccacatattttcacccaacaatttattgacatcttcaccacatacggtggcggtgggagtaccccctcactcttaatcgtcatgttaatcgtctgcaagtcaaaacgcgtcaaagaattgggtaagttggcaattgtccccggtattttcgggattaacgaaccgattatcttcggtttgccagtcgttttaaacccaattattgcaattccattcattatcgtaccggttttaaatacattgatttcagggattgtattccaactcggatgggtaccgtatacaaatggcgttatgttgccatggacaacaccaccgattatttctgggtggctttcaactgggagttggacagggtcagtcctccaattatttgaattagtgcttggaattttaatttactatccatttatcatgatgattgatcggcagtatttggcggaagaagccgaagcggctggcttagacgatgttgatattaattttgacgaaatttaatagaaagaagccattcttgtgaaaccgattagagcagattttaaggcattatttgaagcacatgctgatgagttcttagcggacttgcgggaagtgttacgcgtgccgagtgtgtgtggagcgcaaacgtttgaagcgccgtttggaattggtccgaaacgcgcattggaaacagtgttggcgattgctgatcgaatgggctttaggacggggcaagtcggcaattgtgttggctgggcagaatatggaccagacgaaacgcaagcgccaacttattttgggattcttggtcatttagatgtcgtggatgttgaagatgattggcattatccaccatttgaactgactcaggtagataatatgctgtatgggcgtggtgttttggataataagggaccacttttatcgacattatttgccctgtatctgattaagacgcaaaagataacatttaaacaacgcgtccgaattatttttggcactgatgaggaatctgggagtcaggatatgccaatttatttggcggaacattccgcaccatatgccggattcacaccagattgtaaatttccagccgtctacggcgaacggggcttgttagatgtccagttagcgttaccgattacggacggctctgagcaacaaattacggcgattgaaggacggttcgctaaaagttatctgccagatcatgcacagctgattttggccgatggcacggttaaaacttatcacggcaaaaaggcacctagcaatgcccccgaaatggcggataatgtgttaccgaagttagttgccgatgcaagtcaactcactggtcaaacgggtcaattttatcaatgggtagccgctaaaatcgggacgcagtcaactggggaaaactttgggattaattatcaagatgaagcatcaggagcattgcaacttgctttttatggggtatcgattgaagcccaacagttaagtgtgcatctgacatgtcgttacccaatcccagtgacggaagatcagttgttaactgggattaaagctgccatgttgccggggatgacgttgacggttaaacggcgttatccatcgcaagttactgatccaacattgccatttattcaacaaccctctgcgatttatgcggcagatactggtttggatggcacaccggtcacaacaacgtgcgtgacttatgcgcgcgcgttaccgaacatcatcgcgtttggcccatcatttccaggtcaaaaagggattgcccataaaggggatgaatggcttcaattcagtgactggcaaatgatgatgcagatttattatgatagcttgctcgcagtcggtactggaacataaaaaagcgtgtgccataagtcgggataccctgaggattagccggaaggggatgacttataagaacacgtttagacgattaaagttctaatatcaaaaaaggggctgagacaaaatttacttttgtctcagccccttttactgtttagcgacttgctaatgcgcccattggatcccatggtgcgagaacggttgggtgatcgtattcttctgtttcaatgcgtttcatttcatccgttaagaagcgtttgttgatcacgatttgataaacaaattcgtcaaaccaactatcactcatgacgaagtaacctttcgtcccaactttgtcaccccatgagttttcaaccttccatttggttggttgaccatcgacgaggtcgacaccggtgatgaccatcgcatgggtcatgagactttcaccgtaatcaaggcgttcgcctttagaaattgaaagatccatgccgagcatggcatctttttgataaacttcagtgtccatgatgccgagtttgcgatcagatgattggcctacatcgctaccgaaccaaacggattcacctgcttgtagttgtttaatcgcgagttgtttgaaggtgtcgatgtcgaggtttaaatgccgcacttcacggccaccgaccacattgcccaacatttcaacgctgtataagtggttgtatggtttgtcggcagttggtgagttaatcaatgaaacgtaattttcgaggtcccagccaacgtatttttgatagaacgtttgcggtgtgaggcctttttcgatgtgatagttgtgatcatcatcgcggtattcaaagtcgaattcaacgggtggttcgcccaatgcataaacgagcatccggtaaacttcggttaacatcgcgtcttttttagcttggatgtcggcttcgctaacaccgtcggctactaattggcgtaatgtaacggcatctttacggagtttaaggttcaaaacgccgttgagttcgcttgatttttcactattatatgtttcgggcatgactgacttaggtacaatcccgtatttttcgatgagtgcgcagagcatgtcccattggccgccatcttgttggggcgttgtcattaagaagtcgactttgcggtcgccaattggttggctggcagtcttcaagacgttttcgtagaagtagtttgatttttcgaatttgtcccagaagttggtgtagttttgggacaattcgaaatccttaattttgaattggtcttggaggctgtggcgcattgtatttaacgcggcgaacatccagcaacgaccagattgcttttgattggaaacggcaccggtatctaagtcaattgaaaaaacgggggccattttggcttttgaatcggtattagcactcgtggctaaaaagccgttgttcataatggcatttttaattgtgttggattgtggtgttgccttgaaatcggctttgaattgttgaatatcttttgctgtaatgggttgaaccatgtggaaaacctcctctaaaatttggtgggttaaattaaattacccggtttgaatggcattatttttttgaaacgtgctttcatcaacaacttcttccgccttacctcacttgccaaatcggcgactgcattgccaattcgtcaagtgctgtaagtgctcagaagtaacccgttgatggcgcactctgatttgaaacgtgctccgtaagccatatccttccggttaaccctgaacgtcaaacgattgctggcgcaatccttcgccgttctgtgttaatcctcaggataaactcggcttactacgcactctattgcagtgcgtcccatgggtctagcttaattggggtttttgtgagtgcggcttgttcttcttttgtaaggtacgcttttttgacaattacctcgtaaacgtagtcgtcaaaccaagcgtcgctcatactgaagtaaccttttgtaccgactttggcactccatgtgttttcgactttccatttcgttggttggtcgtttacgaggtcgacaccggtgagggtcatcgcgtgggaaacaacgccttgtcggtagtcaagtcgttggtcttttggcatcgtcaaatcgaaaccaaagagtccagaatagtcgtaaaggttgcgatcaagccagcctttttgtcggtccatatccgcgagcacgtcattgccaaaccaaattgtttcaccgttttgtaaggattggatagccagtgcttttaaacgttcagggggtaagtttaagaggcgcattgggtgaccttcgactaccgtgttttgcgattctaaactgtagagttggttgtattgtttacttgtttgggggctgctgacaacggtgatgtagtcgtcaaagttgcgattgagatatttttgatagaaactttgcggggttaaaccgcggtcttcatggtaattttggtcgtcatcgcgataggtgaagtcaaacgtttcgactggttcgccgaatgcgtaaacacatagccgatagatttcacttaagaaaccagtccgcgtttcactgatggttgtttcgctagcgttgtcagcaacaagttgccgtaattgaatcgcatctttgcgcagtttcaaattaagagtgctgttgaattcagtggttaagtcactgttataagtttcgggcatgaccgacttgggcacagcaccgtatttttgaatcagtgccactgcgttgtcccattggccaccgtcaaaatcgggaccagcgagggtgaaggcgacttcgcgatccgtaatcggcttgtcggcagttgctaaaatcttttcataaaagaggttcgccttttcgatgcgatcccagaaagatagataattttgggagagttcgaaattcttaacgtgatatttctgttcgaaatcgtggcgtaatgtatttagagtggcaaataaccagcaccgcccactctttttttgaaagctgacatcaccagtggggaggtcgattgagtaggttggatcaagggtgacggcagcatcggggcgttgactaacggcgttaatgccattcgtcatcacagcatttttgagcgtcgttgcttgtggcacgccagctaaagcggtccgcatcttgattaaattattatgtgtaatttctttggtcatctaatcactccttaatttttgaattagtttaattctagttgattagatgggagatgtaaaccgaataacggggataaagctaaaagaatggtgattgataaatgtgaaagaaaacgatttatatgagagcacgggacacaaaaaaacgaaccgctgagggttcgtttggaaacgtgctttttaaagctgacgcttgcgcttagctacgtattgcaaacgaccgattttgtcggtcatttaaaacactgtgctagtgcacagtgtcaaatctcctttaaacgcacgctttattttgctgttaaaatcttcacgccatcaggtgcgccaaccacgacttggtcgacgatgtctaggaatagaccatgttcaacaacgccgacttgttcactgagccatgatgccagtaggtggggatgttggacttggttgaggtgtaaatcgatgacgtagtttttagaatcagttaagacgtgttggccgtctgcagtcatccggaattctggatttaagccttctttagccattttgttgaacacttgttggctgccaaatggaatcacttcaactggtagtgggaagcgaccgattgtatcgaccactttttcttgatcgacaatccaaatgttgcgggttgaagtagttgcgactaatttttcgaataagtgcgcagcaccgccgcctttaatcccttggaagttggcatcgacttcatcggcaccatcgatggttaaatcaatgtggtcgacatcgttgagtgctttgaccggaatcccaagtgatttggcttgttcttcagtacgaattgaggtgcagacacatgttaagttgaggtgttctgcttgtacccgttttgcgagggcttccaccatgtaaactactgttgaacctgttccgagtcctaaaatcatgttatcttcgacaaaatccactgagcgttcagctgccatctttttcattgcattcttatccatcaagacaccccttttgtattaataaatctattatacgaaaaaaacgctttaattgggcgctttttgttaaatttttaattaaatcagccttaggcattattcacagcctccgcggtttcatggtatgatacagtggtacaaaaagaacccaaatgggcgataatattaggagttttaggaatgaaaaaacgcggctttgaaattgtgaccaaataccaagaggcgggattgagtttaccggtgcgttcaacagcgcattcggcgggctacgactttgcttgtgcggaggacttcgtgttgccatcaatctggcattacaactttgtgcgtttgttccgaatgattcgaaatggcaaaccgttagtggatgacgattttgaacgtgcatcaaaaacgttgaaaccctttctagtaccgaccgggattaaggcttacatgcaagacgacgaatatttaatgatcgccaatcgttcaagtaacccactcaaaaaagggttaattttacccaacggcgtcggcattatcgatgcggattactacggcaatgatgccaacgaaggtgaaatttttatccaaatggttaacttcagtccgcgggatgttatcttgaaaaaaggtgaacgaattggacaaggcatcttcatgccatatttagtcgcagatgatgaagcgacggtaaccaccaaacgaacgggtgggtttggctcatctggtcgctaaacgttaatcgctaggtcgccgaaaattcacaaacttatgttaaaataaaactaatctcgataatgaaggagaatctttgtggctaaaattaagactcagtttgtttgccaaaattgtggctatagttccccgagattcttaggtcggtgcccgaattgtggcgcttggaaccaaatggtcgaagaacgtgaacaacctgcagctagcgcgaaatcaagttttacgatttcagggcgggcaactgaaccagaacaaattagcaccgttaatattcaaaaggaaccgcgtattaaaactgaattaaacgaactcaaccgcgtgcttggcggtggagtggtaccgggctcattgattctaattggtggggatcctgggattgggaaatcaacgttactcctacaagtttccggacaacttgaaaaggttggtaagattctttatgtttctggtgaagaaagtgcatcccagattaagatgcgggctaaccggcttgatgtgaatggcgatcaactttacttatatcctgaaacggatatgggcaatattcggcatcagattgaaacaatgaaacccgactttgtggtgattgattcaattcaaacgatgagcgaaccagaagtgacttccgcagtcggtagtgtttcacaagtgcgtcaagtcaccgctgaattgatgcgcattgcgaagacgaaccagattacgatttttgtggttgggcatgtcactaaagagggcgctattgccggtcctaagattttggagcacatggtagatactgtgttgtactttgaaggggatacgcatcatacttaccgcattcttcgctcggttaagaaccggtttggttcaaccaatgagattgggattttcgaaatgcgtgaagccggcttaaaagaagtcgcgaacccatccgagattttcctagaagaacgtttggcaggggcgacaggttcagccgtggttgtttcgatggaaggcacgcgacccatcttggtcgagttacagaccctaattaccccaacactattcgggaatgcaaagcgcacgtcttcagggttagatcataatcgagtctccttgattatggcggtgcttgaaaagcgtgctagtctcatgttatcgaaccaagatgcgtatttaaaagcaactggcggtgttaaattagatgaacctgcgattgatttggcgatggctgtttcgattgcatcaagctatcgggataaagaaattccaccaactgattgtttcgtcggtgaaatcggtctgactggtgaaattcgccgggtcaaccggattgaacaacgcgtcagtgaagctgctaaattaggctttaaacgtatttatgtaccaaagaataacttacaagggtgggacgcaccgacggatattcaagtgattggtgtgaccacgattgcagaaactttaaagaaagtattcaactaggcataagttggagcgagaggaggttgaacgatgcaacaaaaacgatttactaaaaaaagaatattaggaattgtgttcattatcttaggaggtgcgcttggaattacggcgttcccagtattttggccattagttcatttggaagacatgatgtatctcaataacggtattactaacgccattttaggggccattattttctatctattattcttggcgctggcaacaccaatgttgagagctatgcaccggcttgaaaaagccttaacgaaacaatcacctagttttattttatttgggagtgttttttcactaattggattgttattagcaaacgttgtttcgattccgctataccggatgcccatttttgcattaaatacagttgtacccattttattgatgattgctttagggtatctcggctttcgaattgggacaacgcgaatggaagaatggcgccgtttgatgcaacctaagaaacgcaatgctgatgtattagaacgtaaagtcggcgataatttccgtaagtataagattctagatacaagtgtgattattgacggccgaataaaagaaattgctaagacgggctttatcgaaggcacattgatggtgccaaactttgtcttacatgaactacaattaatttcagattccgctgataatttgaagcgggcacgtgggcgccgtggactggatatcttaaacgatattcaaaaagacgatagcttatctgttgaaatgtacgacggtgatttcgaggatttaacggaagtcgatagtaaactcgttaaattggcaaaattacttgatgggattgtcgtgacgaatgattataacttgaacaaggtctgtgaatttcaaaacgtaccggtcttcaatatcaatcaactcgccaatacgttgaagcctgcagttttacctggagaagcgatgaccgtgacggtggtgaaagccggaacagaacggcaacaaggggttgcctatcttgatgatggcacgatgatcgttgttgaagatggccaacattacttaaataaaccgctagaagtgattgtgacaagtgcgcttcaaaccgctgcggggcggatgatttttgctagaccagcgcatcaacaaaaaggcttgaaagaaaaatagccacgcagaacactttacacggtcgtcaataatctgtatcatggagaccaactaaaccgttaaaattgatgaagagaataagtagatgatgccaattgttaagagagctttcgaattgctggaagaaagccgattgccccatcgaaatgcacctctgaaatgccaagtgactttgtgacttagccgggacaccgttacctgttcaaggcatttttgcaaagaaaagtggaaccacgctcaatcggcgtcttttgttaaccaacaaaggacgctttttatttggaagagtgcgtttgaaacggtttgacttcgagcatttgcctaataccgtgagggagcgccaccggcgatcgtttgcggtatggagcaaagcacagaagtcagtttcaaaaagcacgtttagaagaagagtgcgacagcaggtggttatattttgagcattaactggatttgacgaattggcgatgcaatcgccgattgggcaaatttggttaagcgcagaaataagcctgcaagagcacgtttaagaaaggaagattcgatgttaaccgtttataataccctcacgcgtcaaaaagaagtcttcaaaccgattcaagcagaccgcgttaaaatgtatgtctgtggaccaactgtgtataactatattcatattggtaatgcgcgcagtgcgattgcctttgatacgattcgccgctatctcgaataccgtggctatcaagtcgattatgtctcaaattttaccgatgttgacgacaagatgattaaggctgcgaatgcggaacaaatcacggttccggaattagctgaacgctatatcaccgcttttaaagaagacacccaagcacttaatattgaaacagcgacactcaatccgcgggcgacagaaaacattccagaaattatcgcgttcattcaagacttaattgctaaagattatgcctatgccgttgatggcgatgtttactatcgtgctcgtaaatttaaggactatggccatctagctggtcaagatatcgatcagctcgaacaaggggccagcgaacatacagcaaccgaagaaaccctacgtaaggaagatccaatcgactttgccctttggaagtcagaaaaagggaccgatattgcttgggattcaccttggggtaaggggcgaccaggctggcatatcgaatgttcagtcatgtcgaccaaatatttaggcgacacgattgatattcatggcggtggccaagatttagagttcccacatcatgaaaatgaaattgctcaaagtgaagcgaagactggtaaacatttcgtcaactattggttgcacaatggctttgtgacagtcggggatgatgatcaaaaaatgagtaagtctcttggcaacttcgtgacggtgcatgatttgattcaagaagttaatccacaagcattacgtttcttgatgagtagcacgcaatatcgccgaccaattcgctacagtgaatcattattagctgaagcgcaaacgaacctggatcgtttaaaaacgaccctcgataacttagcgttccgccaaacgactgctgaagcgggtgcagacgcagacattgccgcacaagcggcaagcttggaagacgcctttgtgacagcgatggatgatgattttaacgtgcaaaacgggttaacagaattgtatgaactcgctaagcttagtaatcaatacctggaacgggctaccgtccaagctggtacgttagtggatttaactacccgtctaacgcgcttgttagccatttttggtgttgagtttaaggcggcccaactgttggacgcagaggtcgaaagcttgattgaagaacgcaaagatgcacgggcagcaaaggattttgcccgcagcgatgcgattcgcgatcaattgaaagaacaagggattattttggaagatacaccacaaggaatgagatggagacgcgcatgaaaaatgctttacaactaaacgggattgcgttggcatatatgggcgattcagcctacgaagtgtatgtccgcgcccatttgctagaactcggtttaaccaaaccaacgcgcttgcaacaagtggcgacacattatgtgtcggctaaagcgcaagctgctttgattggtttgatgatcgatgataattatttaacagaagaagaaatgaatatttttaaacgcggtagaaatgccaaaagttatacgaaagccaagaatacgagtgtttcgacttatcggacctcaacgggctttgaagcagtttttggctatctatacttaactgaacaacaagagcgcgtcgctgaattagcccactggtgtattcaacaagtcgacgctgggaggacccatgagaaaaaataataaccaaccattcaaacaaaagaacaacgaattcaatagtcgtcggacggccaataattcggcaaagccaacgcgccgtccagctaacaagaaaccagcagcacccgtcgaagaagcagttgttgaagaacaaactgatttcgtcatcggaaaacacgcttctttagaaacattgaagaccagtgatgcgaagaaaatcaataaaattttcttacaagatggcttgaaggctgactttgtccacgatgttgtgaaattagcgaaagaaaaacgtctaatcattcaaaatgtgcctaaaaataagttggacttattgagtgaccgtcaaaatcaccaagggattatcttagcaatcgcaccgtttgaatatgcgagtgttgatgatattttcgctaaggccaaagcccgagaagaagaaccgtttatcttaatcttggataacttggaagatccccacaacttgggttcaatcatgcggacagctgatgcggttggtgtgcatgggattattattcctaagcatcgtgcggtggggttaacatcaacagttgctaagacatcgactggtgcgatcgaacatatcctagtggcgcgtgtcacgaacttaacacaagaaattaagaaattgaaggaccgtggtctttggatttttggcaccgatatggctggtaccgactatcgtaagtgggatgctaaaggaccaatcggcttaatcattggtaatgaaggcaaggggctttcaccaattgttaaaaaagaagttgatcaaacgttgacgattccaatggtcggtcatgtgcaaagtttaaatgcgagtgtcgctgcgggggttttaatgtatcaggcttataatagccgtcaacctttggtatagcagatgaaaaaacagatcttaattgcagatggttataatatcattgggaactggcccgagctgaataagttgaaacaaaatgatcatctcgcggatgcgcgtgatcgcttattgcagatattatcagaatatcgcaagtttcgtgagattgaagtcatcttagtatttgatgcaatgtatgtgccagggattaaacaaagttatgtgcagtataatttggaagttgtcttcaccgatgaggatgaaacagcggacagttatatcgaaggcttagcgggtaaattaatgtcgccgattacgcaagtgacggtggtttcgagtgatcaagctgagcagtggacgattttttcacggggcgcattgcgggtgtcttcgcacgatttttatcgtgagattcgccgaacgcaccgtgaaattgaccatgatgccaagcattatcatgatcggaccttgcaacggaatatgccgtggaatccggcgcaactagatcaacttgcacaggtgcgagatgcactaagtgctgaaaaagatgattaaacaaacgttctcttaataaatgtacgataacttgttaagataaaggcgtggggttgcgtgagaggtggttcattgatggaattagcaaaacgtgatgcaaacttaattcaagcggtggttgaaaacgattctgaggcgttggatgttttatttaaagcctacctaccaatggtttatcgcacctttactccatattatattcgcttatttgatgaggacgattggttacaagaagcgcgaatcgtctgttatgagacttgccagtgttatgatcaaaattgcggcaaaagttttggtggtttttataaattacgctttcaccaccacgtattaaacttgattcgcaaagaacttgctcagaaacgacgggtcgatcagcaagccctgttatttgattgttgtccggaatgcaatgcgctcgctgaagataccgtggcatactatcagtcaacggttgaaatgcgggcgtacttagagacactatctgctttagagttagtggcctttcgggttttgacggggcaactagcagttgagcaagcgtgtagccagctagattgcacgtttgaacagatgaaacgggcacaatcgcgttgccagacaaaattaaaacgattctatactaaacaataaaatagctaaaagctgctaaccgacgatttttaggcattggttagcagttttttgtgtttagtagggagcataaaaaatacttttcatgcgataaaataacaggtgacaggttaatgattgggataggtcaacaaaatgggcggcttatatatttttaaataacattaattgacattaataaagaaagcgcttatactaaaaacatagaggaaatgaaaacgctttttataagccttttatcgctttctaaccaattaaaatttaaggggtaattcattatggcagaaaaaacaatcatgttatgttgtgcagcagggatgtcaacaagtttattagtttcaaagatgcaaaaggccgctgaagcacaaggtttagacgcagaaatttttgcaactggcgcttcagatgcagacaaccaactcgaatctaaaaaaattgactgcgtactattaggccctcaagttcgtttcatggaaggtcaatttaaagaaaaattggcaccaaaaggaatcggtgttgaagtaattgatatgaaggcttacggcatgatggacggcgaaactgtcttgaaacaagcgttagcattaatcggttaaaaaaagattaagaaaagcggtagcgacctatttttaggcggctaccgctttttttgtttatgaatcaggtataattaaggtaatcaagtataaaggagtttattcaatgagtttaattggtacattaatttggtggctattcgggggattagtagaggctatcggttggtttattctggggattgcctggagtattacgattattggaattccagtcgggctacaatgttttaagattggcgcattgaccttgatgccgtttaacgcaaccgttgtttcaacggggggtgcaggttcgtttttattaaacattgtttggtttttcttaggtggtcttgtgatgtgggcgagccatgtcttttgggggctattattatcaattacgattattgggattccatttggccggcaacactttaagctagcggcgttatcgttaagtccgttcggcaaacaaattaattaaaatgcaaaagggcaacgatattgatcgctacccttttttatgtggtgcaggcatatttctgtgcttagctacacaagtcaaacgattgcttgtagcaagcattcgccttgttaggctgatgctcgcagcataaccggcttttgacgcactctattgtgttagttcttctagtgccatcgcttgttcttcccagtctgattctgtttgagcgagttcagcttggactttttctaggtcttgttgtagttcttgaagcatgaggggtttagtaattacgtctgcttgggtcatttgttcttggattgcgttggccttagtctctagtgcggccattttttcttctaaagcagtaacttcgcgttctagtttccgttgtgcacgttggttttccttacttgctttgtaggcatctagtgcattggcacttggttggataattgcactgttttggctagctgcttctgcgtaagctgtttcttcagctttcttggcgaggtagtaatcgtaatcaccgaggtatcgtttgctaccagtatctgatagttcgataatgccagtggcgacttgattgatgaaataccggtcatgggaaatgaagaggacggtgccatcgaattcacggagggctttttccaagacttccttgctatcaatgtccaaatggttcgttggttcatccatgattaagaaattgtcatggttcatcgcgagtttcgtcaagagtaagcgggctttttcaccaccactgagttgtgacacaacctttaaaacatcgtcaccggtgaataagaaactaccaagtagtgtgcgaatttccttttcaggtgttgtatggtgttcatcccataattcgttgaggacggttttgttagtgtgtaaattgcgttgctcttgatcgtagtagcccattgaaacgttactaccgactttttcatggcctttgatgaacggaatttggtgcaagatacttttgagaagggtcgatttaccaattccgttaggtccgatgatggctaagcgttcgtggcggttcacttcaaaattgattggttgtaccatgattttatcgggggaatagccgacagcggcatcgcttacttgcaatacttcgttaccgcttggatgttcgctttcgaaatgaaaatgaattttaccggcttcgttttgcggccggtctaatttatccatcttttcgagttgacggcggcgactttgggcttgtttcgtggtacttgcgcgcactaagtttttatcaacaaaggtctgaagtttatcgatttcagcttgttgtttttcataagccttccattcgagtgagaggttagcttcttttaaacttaagaaatggctgtaattaccggtataatgggtcaatgtgtggcgactcatgtcgtagacttctttagtgattttatctaagaagtaccggtcatgtgagacggtgagcaaggcaccgggataagtttgtaaataattttccaaccatgttagtgtttcgatatctaaatggttcgttggttcgtccaaaataaggacgtcttttttctcaagcaataacttagcaagtgcgagtcgcgagcgttcgcctcccgatagtgtactgattggcttttcaaaggtgtcttctggaaattggaaaccatgtaagacgccacggatttcggcttcatagccgtaaccattagcttcagagaaatcgtgttggacttggtcatatcgttttagtaaggctgcatattcttcgctagcatggtcaatggttgtgtccgcaattgcggtctcgagttcatgcatttgggcttccatttggcggagatcatcgaaaatggttaacatctccgcatagattgtccgggttgagtctaagccactatcttgcgctaagtaaccgacttgagcatttttgctaagaatgatttggccttcatcaggcgttgtgatgccggcaatcatttttaataaggttgatttaccagccccgtttggaccaacgagggcaacacgggcgcggtcttgtacttcgagttgtgcgtttttgaaaaggtaatcgccgccaaaactgcgtgcgacttgttgaacttgtaataatatcacggctaaaaatcctttcgtgcggtgttttttaaagttaattgcgttcatttttataatactactgtcaactatcataacagatttaaacgatggacagtcaaaattgtaaatatattgcttttcacaagaaaattcagtatgatttcagtatggtactacactattttcacaagcaaatcaaaaaggaggtttcaaatggttgagaataatatcccaagagcaactgcaaaacgattgcctttatattaccgctatttaaactttttgaacaattcagggaaaactaaaatttcctctactggattatctgaagcagttaaagtagatagtgcgacaattcgtcgtgatttttcatatttcggtgcactgggcaaacgtggttatggctatgatgtcgcttcgttgctagattttttcaagaagaccttgaaccaagatcgattgacaaacgttgcattgattggggtggggaatttaggccacgccttattgaactacaactttaagcaaaccaataatattcggattagcgcagcatttgatgttaaacccgaaatgattggaacaattcaaaccggtgttcctgtctattcaatggacgagatggccgaacaattgaagaaccaacagatcgagattgtcattttaacagtgccaattgatgaagctcaagaagtcaccgatgaattagtggccgctgggattaaagggattatgaactttacgccaattcgaatttctgtgccatcaaacgtgcggattcaaaatgttgatttggctaaagaactacaaactttgatttacttcctcgataattatactgatgaacaaaatcaagaataaaaatagcgtttaaacaagttgctcgtagtagccgcctgtttgaacgctttttttaacgattgagatacagtaaagtgacgatcaggttcatcccagcatggctgatgattgtggtgaaaatcgaacctgtcttgcggtacagccaacataggaaaagaccgatggccgtgtagattaacaaatgcccgtcctgatgtaaaaaagcaaacagtaaacttgaaatgatggcggctaaaatgcggtttaagcgactggctaatccaccaaagattgctttgcgaaacgtgatttcttccataatcggtgcggcgatggtcgttgctaaaataagaaacggttgttgttgcatcatggtcatcagtgaaatggtgttgagcgatttggcagtgatgtggagaatgttttgttcaatgaagccggcgagaatctgaattactaagaccagtacaatgccacacaacccccaaatgataatgggtttgagtgggaaaggccgctgctcaatggcattggcttgtgtgcgttgattaagatagagtaaccaggcggcaccgaggcaatcaacaatggttgtgattagaaaaaacgaggcagatagatgaccaaaacggacgactgcactaggaatcaataaaatgaacaaatagctaatgataattgaaaaattttgtttgtatagcgtcatgtgaaagctcctcaaaggttgttgtgacaatagcttagcgtattagcattcaaattgcaaaagtgctagcataatacttgcaatgttctgaaaaaatgctatgataaaaattgtgattagcacttgagatgatagagtgctaaaaaagtaaaattgatggagggattttaagtgttaaaaccattagaagatcgcgtgattatcgccgttaaagacgaagaagaacaaacagtaggtgggattgttttggcaagtaatgctaaacaaaaaccacaaaccggcaaagtagtcgcagttggtaccggcacattaacaagtgacggcaaacgaattccacttgatattaaagaaaacgatgaagttatttacgataaatatgcaggttcagaagttgaatatgaaggtcaacaatatttagtgctccatgctaaagatattatggctattgttgaataataataaacaaaaaaattttttgaggtgaataaattatggcaaaagaacttaaattttcagaagacgcacgttcaaaaatgttggcaggggttgaccaattagccaacacagtgaaaacaacattaggaccaaaaggccggaacgttgttttggaaaaagcttacggttcaccagaaattactaatgatggtgtgacaattgctaaagcaatcgaattagaagatcattttgaaaatatgggtgctaagttagtttctgaagtggcttcaaaaacgaatgacatcgctggtgatgggacaactactgctactgttttagctcaagcaattattcgtgaagggatgaagaacgtcacagccggcgctaacccagttgggattcgtcgtgggattgaattagcaactaaagaagctgttaagaagttacacgaaatttcacacaaagtcgaaagtaaagatgccattgcccaagtggctgctgtttcatcagctaacgaagaaactggtcgtttaattgctgatgcaatggaaaaagttggcaacgatggggtcatcacagttgaagaatcaaaagggattgatactgaattaagcgttgttgaagggatgcaattcgaccgtggttacttgtcacaatacatggtaacggataacgataagatggaagctgacctagataacccgtatatcttaattacagataaaaagatttcaaatattcaagatgttttaccacttttacaatcaatcgtgcaagaaggtaaagccttgttaatcatcgctgatgatgttgatggcgaagcattaccaacacttgtcttgaacaagattcgtgggacattcaacgtggttgctgtaaaagcccctggttttggtgatcgtcgtaaggaacaattagaagatatcgccacattaacaggtgccacagtgattacaagtgacctcggtctagaattgaaagaaacaactatcgatcaattagggacagctggtaaggtaactgttacaaaagatgatacaacaatcgttgaaggtgctggtagcaaagatgccatcgctgaacgggttgaaaacatcaagaaacaaattgctgaaacaacatcagactttgaccgtgaaaaattacaagaacgcttggctaaattagctggtggcgttgcagtgattaaagtcggtgctgccacagaaacagaattgaaagaacaaaaatatcggattgaagatgctttgaacgcaacgcgtgcagctgttgaagaaggctacgttgccggcggtgggacagcattaatcgatgtgatcgaaagtgttgctgcgcttaaagaagaaggcgacgttcaaaccgggattaacattgtgcttcgtgcattggaagaacctgttcgtcaaatcgcaaccaacgctggtcttgaaggctcagtaattgttgaaaaagttaaatcacaaccagttgaagtcggctacaatgcagccaacggcaactgggaaaatatgattgaagccggcatcttagatccaactaaggtgacacgttcagcattacaaaatgcagctagtgtggcggccttaatgttaacaactgaagcagtggttgctgacaaaccagaagacaacccagcaccagcagcaggcatggacccatcagcaatgggcggtatgatgtaaagaagtgcgtttgaaacgggttggttctgagcattaacctaaaaacgagcgttatggcggtttttgccataacgctcgttttgtagttaagcggaaggcgttataaccaaaaagcacgattaaatccaaagttccaaaactggcaaaagttttggaacttttttatttttcaaaaaaaatgcgcatatataaattgtgcgcaaccctattaattaatttgattgcggtataataatagttggaggtgttgacaatgatttttcgaaaccggcggatactgataacctgtttaatgttaggtggcttctttttagcgcgaccacaaatggtccaagcaacgcctgaagaaacgcaaactgccattaagacagcacaagatcatctatccgaattgaataataatattagtaatttaacgttaaaaacaacgcaattgaacgaacaaatgactgcaaaacaggcggatattaaagaaaaacaagacgagttcagcaaaacatctgctgattatcaaaagcaagtggcgactattgaaggtaacctgcggcaattacaaacacgagatagcagttttaatcttgatatgatcgatagtttattgtcgagccaaagtttgagcgatttattccaaaaaggttcaatcatcaatcgactgttagacgctaaggcggataatgccgctgaaacggcctcattagctgaaaaaaagctgaacaaaagactgaattagaagcgcaacaggccaagctggtatcattatcacaggaaaatgatgccgcaattaaggacttagatcaacaaaaacaacaagctaacgaccaattaacgcaactacaaacgaagttcaagaaagaattagaggcgcaagcggctgctcaaaaagcggcgagtgatgcaggtgccgcattaattactggtaacaaggatttaatgaataataagattatccaagaagcggttaaatatttaggcgaccctatgtttggggtggcaccacacccgaaggatttgactgttctggcttagtgcaatacgtttacgctaaaaatgggattaaattaccccgtgtttcacaagatcaaagtaagttaggcaaagatgtaccgctcaatgaattacaaccaaacgacctattattctggggaggggttggaacagcccaccatgtcgcaatctacattggggatggctactttatccaagcaccacaacctggcgataaagttcgaattactaaaatttcagattacaaaccagattttgcccgtcgtttatcataaaaaataagaactgaccaaggaatcgaggcgtttcgattaccttggtcagttcttttttaaattgtggtagtaattcatgcgtaactatagtagaatacgatttgtttgaataaacggcaattatttttttaagttatagagaaattcaaaagtcactgtgtggattgcgacgaatgatattcacatgagggctttttatgttagaaatattatttaaaggggtcatattgctatgcaacagttaaaacggatttttatcgggaaaccgttaaaatcttccgatgagggtaatcaaaaattaggacgctttaaagcgttagcgatgctatcttctgatgcattgtcatcagtggcctacgggacagaagaaatcgtcatcgtattgacgaccctttcggccgcggcaatttggtattcaattccaatcgcagcctttgtgctcgtattgctattgtcattaactttgtcatatcgccaagtgatccacgcctatccaggtggtggtggcgcctacgttgtttccagtgaaaatttggggaaaaatgctggtttagtggcaggtggttcactgcttgtggattacatgttaaccgttgcggttagtatttccgcgggtgcggaagcgatcacctcggccattccggcattgtatgggcatcaagtagggatttccttcattatcgttttgatcttgatgggaatgaatctacgtgggatgcgtgaatcagcatcatttttaatggtgcccgtttacttattcgtcttgatgatgactttaatgatcatcgttgggtgttataagatcttcacaggtgcgattccgttccacgcaacatcaaccgttggggctgttgtaccaggtgtttcgatggcgttgatttttagagccttctcatcaggttcatcatcattaactggggttgaagccatcagtaatgcggtaccatttttcaagaagccacgtgcaacaaacgcggctgaaacattagcaatcatggcagccatcttaggtttcttctttgctgggattacatttttaaactactggtacggcattgtaccagcagaaaaagtaactgttctatcacaagtggcccaacacacctttgggaaaggctttttattctatattgtgcaatttgcaacggcctttattttagccgtcgctgcgaatactggattctccgcttttccagtgttagcgtataatttagccaaagacaaatatatgccacacatgtacatggatcgtggcgatcgtttaggttattcaaacgggattattacattggcgattggttcaatggcattgattttcatctttaacggggatacatcacgcttgattccactttatgcggttggtgtgttcattccatttacgctttctcaatctgggatgttgcgcaagtggtgggtcgaacgaccaaagaattggtttggtaaatcaattgccaattttgttggcgctttgatttcgtttgccatcttagtcattctcttcgtttatcgcttacctgatatctggccattcttcatcatcatgcctgttatgatttggattttctataagattcatgatcattacaagaaagtggcgcttcaactacgcgtgagtgctaaagaagccgtcttgcatgattatgacggttcaactgtgattgtcttggtcagcaacgtgacccaagtaacccgtggtgcgctagattacgcacaatcaatcggggattatgtgattgcgatgcatgtctcaacggatgaaaatccagccaaggaacgtgaaattcaagctgaattcaaggaagattttccgaatgtccggttcgtcgatgtccattcatcataccggtcaattcaaaaaccaattgttcgctttgttgacattgttagcaagaatgcgcaaaaacggaactttacaaccacggtcttggtcccacaattcgtaccaagaaaaccatggcaaaacattttgcataaccaatcaagtctaagactaagaacggcatttgcaaaccgcgaaaacattattatttcaacatatagttatcacttaaaacactagaagtgcgactcgatctgagtaggctttgaggattaacagtaaaatgggcattgtggcggttcttgccatgatgctcattttgcagttaaccggaaaagactgatcgaggagcgcgttaaagaaagaagtgcgtttagcaaccgagcattaatacaaaattggcagttatcccgagttgtgggatgactgccaattttagattaagcggaagttggtgcaactaaaagcacgttagaagagaagtgtgtttgaaacggtttgactttgagcattagcctaaatctgtgaatgagcgacggagttgatcgtttgcggattgtagctaagcgcaagagtcagtttcaaaaagcacgttaaaagaagaagtgtgttcaaaccgattatgttctgagaattagcaaaattagacgaataagcgacgaagtcgattggttggctaattaggctaaacgcaggaacatggtttgaaaagcacattatcagccccgctcaccttttcggtgcgcggggctttttttgtttttctacgggtacagcaaaactttttattctgggcaaaaattgctacaatagaagctatatcaaagtctgagaaagaacattaaggggcgcaacatgcgaattttatttattggtgatacagtgggcacaatgggtcaaaaaatgatcaatgattacctaccagcattaaagcaacaatacaaaccacaggtgaccattatcaacggcgaaaacatcgcggatggtaaggggatgactcaaaaggattataagaatcttttacaagctggggccgatgcgattacgatgggcaatcatacttggaataagcgcgatattttagaattcatcgacgatgctaaaaaattagtgcggccggccaattttccgaaaggaacgcctgggcaagggatgacaatgattaacgtcaatcaagccaaattagccgtgattaacttacaagggcgcgccttgatgaatgaactactaattgatccgtttgaaatgttagatgaaatggtggctgaaattagtaaagaaaccaactgtatcttcgttgattttcatgccgaaacgacgagtgaaaaactcgcacttgcttggtatcttgatggccggatttcagcgttagttgggacccatacacatgtgcaaacaaacgatgcgcgcgtcttacctgaaggcacagccgttttaacggatgctgggatgactggcccttataacgggattctaggcgtgaagcgcgaaaagatcattaatcggtttaaaacacaacggccagaacggtttgaattagtgaccgaaggaccgggtcaattgaatggctgtttaattgaaattgatgacaaaacgggtcacgctaaatcaattaaaccgatccagatttcaccagatcacccctatacgcaattttaagcaccttagcagcagatcaacgtcaatgagagagggattaacaacatgccacaaaaaacgaaagaaacgccaatgatggcgcaatatcaaaaggtcaaggatcagtatccggacgcttttttattttatcgcctcggtgatttttacgaactctttaatgatgatgctgtcaaagcttcacaattattggaactcacactaacagcacgcaataaaaatgcggatgatccaattccaatgtgtggggtaccacaccacgcagcccaaaattacatcgatattctagtcgatcaaggttacaaggttgctatttgtgaacaaatggaagatcctaaaaccgctaaagggatggtcaatcgggaagtcattcaactggtcacaccaggaacgatgatggatgaaaaagccggccatgccaaacaaaataattacttaacagcagtggtggcagatggcgatcagtttggctttgcttataccgatttatcaactggtgagatgaaagtcagccagattgcgagtttggatttattgctcaacgaaatgttgagtttacaaaccaaagaagttgtcattaaccacggtgttaccagtgaggttgtgcacgcgtttgttcaacaacaaattctcgtgtcgtatcaagaagatggcgatgcaacggccgaagtcagtttcgtttcacaaaacatctcccagccccttgaactggccgtgattaaacaattggtcttgtatttggcaacgacgcaaaagcgccatttagggcatttacaacgggcccaagagtacgagccatcccaatatttaaaattagaccattctgcgaagatgaaccttgaattaacggcttctttacgcactggtcataagagcgggacattattgtggttattggatgaaaccaagacggcaatgggtggccggttattaaaacaatggttagaacggccattattggatttaaaggcgattcaaaaccggcaacgccaagtcgctagtttcatgaaccattattttgaacggacaaacttgcaagacgccctcacaaaagtgtatgacctagaacggctagcaggtcgggtcgcatttggcagtgttaatggccgcgatttaattcagttgaagacttccttggaacaaattccaacgattaaaacgattttaacgggcattaatgacgatcagacctttgaccgtgcgttagaccaactcgatccggttgatgatgtacgcgagctcattgaaacggccatcaatcccgatgcgccaatttcagtgactgacggtgggattattcaatcgggttacaacgaaacattagatgattatcgcgatgcgatgtctaacgggaaacaatggctagcacaacttgaagctaaagaacgcgaaattaccgggattcataatttaaaaattggctttaatcgcgtgtttggttactatatcgaagtgacacgtgcgaatttagacgcgctacctgaagggcgttatgaacggaaacaaaccttaaccaacgccgaacggttcattacaccggaattaaaggcgaaagaacaattgattttagaagccgaagaacgctcaaccgcgcttgaatatgagttattcacgcaagttcgcgaaaccgttaagttggagattgaacggcttcaaaccctcgctaaaagtgtggcggcccttgatgtcttacaaagttttgccgtagtcagtgaaaactaccactacgttcagccgacattaatgactgatagtcgcgaaattgatttagtggatgggcgtcatccagtggttgaaaaagtgctcggtcgccaaaaatacattcccaacgcggttcaaatgggcaccgatacggatatgctcttaattactggtccgaatatgtctgggaagagtacgtacatgcggcaactggctttgacggtcatcatggcgcagatgggatgttttgtaccggctaaatctgcgaacttaccgatttttgatcagatctttacgcgcattggtgcggccgatgatttaatttccggtcaaagtaccttcatggtcgaaatgatggaagccaatcgcgcgattatgaacgcgacacaaaatagcttgattctctttgacgaaatcggacgcggaacagccacctatgatggaatggccttggcccaagcgattattgaatacattcacgacaacgtgcatgccaagatactcttttcaacgcattatcacgaattgaccagcttagcggattcactaaccgcattgaaaaacgtccacgtcggggcagttgaagaaaatggcgagttagtctttttacacaagatgctggctggcccagctgataagtcatacgggattcacgtggctaaattagcggggatgccgacaccgttgttgaaccgcgcagatgtcatcttggatcaattagaagataaaccaaaggcagctgtcgcgccggctgctgaaccggttgaagaagtggatgaacaaatttcactattcgaaccagaagtggcaccacaagcggatccaaaagcagctaaagtcctagcggcggttaaacaattcgacttaatgagcgccacaccactagacgcgctaaacatgctatacaaatggcaaaaggaattaaacaaataagagtgcgtcatcaacgggtaacttctgagcatttacagcacttgacgaattggcgatgtaatcgccgatttggcaagtggggtaaagcggaagaagttgttgatgaaagcacgtttcggataagagtgtattcaagcttgtccaacttttgagcattagcacagggaagcgaattagcgacgcagtcgatgatttgattcacagcgctaagcgcagaaagttagcttgaaaagcacgttttagcactaaatacccacacgtcagaaaaaggagaacgctaatggggaaaattcatgaactgtcagaaatattaagtaaccaaattgcggcgggcgaagtaattgagcggccagcttcagttgtcaaagagttggcagaaaatgcgattgacgccaatagtactcaaattgacatcgtgattgaacaggctggtttgcaattgattcaagtcatcgataacggcgatgggattgaaccggaagatgtacccactgcatttaagcgacacgcgacaagtaagattgccacgcgccaggatcttttcaaaattcagtcacttggctttcggggtgaagcgttagccagtatcgcgtcagtgtccgatttgacgattgaaacggcaaccgctgattcgttagggacatttgctcattttaaaggtggcgtcttagaagaacagaaaactaatccaattcgccctgggacggcaatcacggttcgtgatttattcttcaacacgccagcccgcttgaaatatgtgaagacgttccagactgaattggcaaacgtgatcgatatcgtcaatcgcttggcgatgagtcatcctcagattgcgttcacgttaaccaatgatgatcacctgctgttaaaaacggcgggtaataacgatttacaacagacgattgccgggatctatggcgttacaatggctaagcaactcttgccagtcagtgcagaagatctcgattttaaattaaccggctatgtatcgctaccgaaactaacgcgggccagtcgtaattacatttcagtgttgattaatggtcgttatatcaagaattatcaattgaataaggcgattatcaagggttacggttcaaaattaatggtcggccgttatccagtcgtcgttttaaatattcaaatggatccactgttaatcgatgtcaatgtccatccgaccaagcaagaagtccgcttgagtaaggaacctgctttgatggcgttgattgaaaaagcaattcgtgagcgactcagcaccgagaatttaattcccggtgcagtgcagaatctaaaacaaacgaaaccggtcgatgtggaccagcttcaaatggatttaaaccaaattacgagtcaacggcgcaatgcgactggtacggtgcggccaattcagccccaaacagttcctgaaaagccggttaaaactgaaatgcaagcggcagcgcaaattgcggaaaccgaaacaccccttaaacgagaaccaactgctaatcctaatttaaatagcctgccgatatttgaacaaccccaacaattggcccggtgggatgataagtacgaagcagaggcgatcggaaatccgtttggtgaacaacctgaagatgatgcagcacccattgagcgtttcccagcgttacgctatattggacaactgcacaatacattcttattagcagaaggtgaagatggcttttacatcttagatcaacatgctgctcaagaacggattaagtatgaatactatcgcgaaaaaattggtgaagttagcaacgacgcccagaatttattggtgccccttgtgttggaatatcccaatagtgatgcgattaagattcaagcacaaaaggaactccttgccgcagtgggtgtgcagctagagagcttcggccaaaatagttttgttatccatagtcatccgacgtggattgcgcaaggccaagaagaagcaacgattcgcgagatgattgacactgtattggaaaacgggaagttagacattgcccatttccgtgaaaaaacggcgattatgatcagctgtaaacagtcaatcaaggcacaccatcacttagatgatgcgcaagctaaagcattgttggttgatctggcacagacggaaaatccgtttaactgtccacatggccgaccggttttaatccattacacgcaaaaagatttagaaaaaatgtttaaacggattcaagatccacaccatagttgggagggcgaataatgtttatcttagcatcacaatcaccaagacgccgcgaacttttacaaaaagtcgtgcctgatttcgaagtccaacccgcaacaatcgatgaacgccaggtaccagtgacggcaccagctgactacgtgcagatgttggcgcaacttaagggtgaatccatcgcccaaaagaatcctcaggccactgtgctcagtgctgatactgttgtcagttttcagggcacgatttacggtaagccacatgatcgtcaagatgcagccgaaatgttacggcaattgagtggcagcacgcatcaagcttatacaggtgtttggttatccattgatggtgaaatccgcaaaacggttgtccaaactgatgtcacgttctggccgttaagtcatgaaatgattgaaacgtatttagacaccgaagagtaccgggataaggctggtgcttatggtattcagggacagggaagtctgctcgttgagaaaatcaacggtgacttttacaatgttgttggcttgcccatcagtacggtggctcggttgttaaccgctaaggaggctgactaatggcaacgcaaaacattgccgtttattgcggcgctagtagtggtaataaaataatctacacggaagcggctaaggcgttaggcacttggattgctgggcgcaatgcgcgcttgatttatggcggcgcccaagttggtttaatgggcaccgtggccgacacggtgttagcccatgatggacaagtgaccggcgtcatgccagggtttatgagtcagcaagaactcgtccatccaggtttaaccgaaatgattaaggttgatacgatgtcagcgcgtaaagccaagatgattgaactggcagatgtgtttatcgcattgccgggtggtcccggtacgctggaagaaatgagtgaagttatttcatgggcgcgaattgggcaacaaaatggtccctgcattttttataatgtcgcaggctattatgatttgttacaacaatttttagcccacatggtcagtgaaggttttttaacacaggtcgattttgaaaaatacttatttaccgattcgttcagtgtgatggcatcctttatcaaggattaccaaccgccgaagattcgtgaatactaattgctagggtttgagttggccgtgggtcacacttaggcccttcttttacgctttttggctgctggctgtttcacgattcggattttatgttacaatttaacaagcaaatatacgttctcgtaaagtaggtaaatttatgtatgaatatttaaaaggtttggtgacggcggttagtccgtactatgtcgtcttagaagttcaaggcgtcggctatcaattgcaagttgctaatccgtatcgttacaccgaatcaacgaccgatatcgttcagatttatgtctatcaagcggttcgtgatacggatatcacgttatttggtttttacgatctagatgaaaagcaaattttccaaaaattaatcagtgtttctggaattggtcctaagagtgccttggccatcttagccaatagcgatcattctgggttaatccaagcgattatgaatgatgatgtgagctatttgaccaagttccctggggttggcaagaagactgcccaacaaattgtcttagatttaaagggcaagctcggtgatttggaacaaaccgaaacgctcgctggtcaaacggctatcgatcttggtacgcctggtgaatcaccagaattaaacgatgcgttagcggcgttaaccgcgcttgggtattcagcccgcgaagtcaaagcgattaccaaaacactggctgatttcaatgcacaaactacggatcagtacttacgtgaaggtttacgcttattaatgaagaaataaaggaggactaatggatggcagaagaacgaattgtttccgcagaaaacgaagatttcgcagaaacaagtattgaaaagacgttacggccacaagtcctcgcgcaatatatcggtcaagaccgggtcaaaaatgagttggcggtttatattgaagccgctaaaaagcgggaagagtcgttggaccatgtgctattatatggcccgcctggtttaggtaagacgaccttggcgatggtgattgccaatgaactgcatgttcagattcggacgacgagtgggccagcaattgaacggcctggcgatttagtcgcattgttgaacgagttacaacctggtgatgtactatttatcgatgaaattcatcgcttgccgaaagtggtcgaagaactactttattcggcgatggaagatttttacatcgatatcgtggtcggacaagggccaactgcgcacccggtgcattttccattgccaccgtttaccttgattggcgcaacgactcgggccggtttattgtcggcaccgttacgtgatcgtttcggaatcgtcgaacatatggcatactatgatgaagatgatttggtcgatatcgttgaacgctcggcagatgtctttaacatggccattgtccaagaaggcgcgcatgagattgcccgtcgttcgcgggggacgccgcggattgcgaaccgcttattaaaacggattcgcgattacgctcaagtggcggaccaagcggcaattgatcaagcgattgccgaccatgcgcttagtcaactacaagtcgatgtacgtggcttagatagtattgaccgcaagattctccagatgatgattgactattatcatggcggtccagtcggtctaaagacgattgcggctaatattggtgaagaaaatgaaacaatcgaagccgtttacgaaccgtatttgttacagattgggttcttaaaacggacaccgcggggacgtgttgtgacgcccgctggttatgaacatctcggcattccctattcagaaaattagaaagaggttacacaatggtttcaacagaagattttgattataatttaccagaagaattaattgctcaaacaccgatgattgaacgggcagcgtctcgtttattggtgatggatcacaaaacaggcgcactagaagataaagttttctacgacattatcgatgaattaaatcccggcgatgcagttgtcatgaacaatacgcgggtcttgccagcacgtttatacggtgtcaaaccggatacgggtggccacgaagaagtcttgcttttaaacaacacgcatgacgatgaatgggaagttttgatgaagccagcacgccgggccaaagtcggcaccgaagtcgtttttggtgatggtcaattaaaagcagttgtgaccaaggaactcgaacacggtggccgcatgatcgaatttaagtatgatggcatcttcatgcaaattctagaagccttaggcgaaatgcctctaccaccatacataaaagaaaaattagacgatccagaaatgtatcaaaccgtttatgctaaagaaccaggttcagctgccgcaccaactgctggcttccactggacagaagaactcttgcaaaaggtgcaagataaaggcatcaaactcgtgtacttaacgttgcatgttgggttgggaactttccggcctgtttcagaagacaacgtggaagatcacaaaatgcacagcgaattttaccgtttaacagaagaagctgctgcaacgttgaatgaagttaaacaaaacggtggccgcatcgtggcaacggggacaaccagcattcggacgctagaaacaattgcgacgaagtttgatggtgaactcaaagctgatagtggctggacatcaatctttatcaaacctggttatcaatggaaagctgttgatgcattcatcacgaacttccatttaccaaaatcaaccttagtgatgttggtcgcttcatttaccggtcgcgaaaacatcttaaatgcttatcaacacgctgttgatgaacggtatcgtttctttagcttcggcgatgccatgtttgttaaataattcgacaaaaatgaggtggcagcattgatgtatttgagaaaagcaacgtttacagatttaccgcggattttagagattatcgaacatgcaaaggccgccttaaaggatcgccaaataaatcaatggcaagcaggtgaacctaatcaaactcagtttgaagacgagattcgccaagaattatgttacattctgatggctgaccaacaggtgattggggtcgcctcaattctagcaactgaagatcctggctatgcagcaattaccaatggtcaatggcaatctggttcgacaccttatttttcaattcaccgtgtcgcactcgatagtgccttccacggccaacatctcgggacacagtttttaaccttattggtgaccgctgccagtttacgaggcgcacatgatttacgcatcgatacgcaccctgataacttggcgatgcaacatatgattcaaaaagtaggctttcaatatcgtggtgacatcttcattgcaaacggtccgtcaccgaaacgctatgcgtaccaattattactgaaccaacaataatcctagaattggagtcgattaaatggaaccagcgatcaagtatcgtttaatcaagaaagaaaaacataccagggcgcgccttggtgaaattgtgacaccacatggcacgtttaaaacacccatgtttatgccagttgggacccaagccagtgttaagacaatggcgcctgaagaattaaaagaaatgggtgccggcattattttatcgaacacctatcatctctggttacgacctggggaagacatcgttgaaaaagccggtggtcttcataagttcatgaactgggatcgcggtgtgttaaccgattctggtggtttccaagtgttctcacttgcgagattacgggatatcagtgaagaaggggttgctttcaagagtcatttgagcggcgaaaaactgttcttatcaccggaaaaagcaatccaagtcgaaaatgctttgggtgccgatatcatgatgagtttcgatgaatgtccaccattctttgaaagttatgactacgttaaaaaatcagttgaacggacatcacgttgggctgaacggggcttgattgcgcatcaaaacccagcaacgcaaggtctatttgggattgtccaaggggccggctttgaagacttacgccgccaaagtgcgcgcgatttagttgggatggacttccccggttattcaatcggtggcttatcagttggtgaatcaaaaggcgaaatgaatcgcgtgcttgatttcacaacaccaatgttacctgaagacaaaccacggtacttgatgggcgtcggttcgcctgatgccttaatcgatggtgtgattcgcggtgtcgatatgttcgattgcgtgttgccaacccggattgcccgtaatgggacaacgatgacctcacaaggccgattagtggttaagaatgcgaagtactcagaagacttccgcccattggatcctaagtgtgattgttatgtctgcaagaactacacccgcgcttacattcggcacttgattaaagcggacgaaacgtttgggattcatttgacgagttaccataacttatacttcttgattaatttgatgcatcaagtgcaagatgccatcgaacaagataatttattggaattcagagaagcgttcttcgaagaatatggttacaatgaaaagaacactcggaatttctagtgaatcactggaagttgcttgataagtctgatagagttagtaatagacaaaattgaaaagaggttttttaaatggcaaactttgtgttaggtgccggcggttttaatcccagtttcttcgttatcttaattttaatgatggcaatgatgtatttcatggtaatgcgcccacaaaagaaacaacaacaaaaacaccaagaaatggtgaaccaaatgaaaaaaggcgacgcagtcatcacaatcggtggtttacacggtgtgattgattctgttaatacagatactaaaatcgttgtcttagattgtgacggcgtttacctcaagtttaacttgagcgcaatccggacagtaacaccaactgcttcagaagccgcaacagtggttgaagaagaaacggttgaagaaacaaaagaagatacaaaataattcagagagcgctcgattgaatacttcaaccgagcgcttttttatttgcattatatagtaaatttattatcaaatgtaggcttttaaaagataaatcgcctttaactaagaaataaaatttgtaattataatcacaaaacagtttacaaacaactcaaaatgcgctaaactaactttgttaaataaatcacaatagttaattggcatggagggaatcgatatggttaagaaagcagcagttgaaacggttgaaaacacagtgaatgaaatggtcaccgatttagtgacgcgtgcacaacgggcattagcaattttggaaacattcgatcaagccaagattgataatattgtccatcaaatggcgattgctgggttagaccaacatatggcactcgctaagatggcggttgaagaaactggccgtgggatttatgaagataaagccatcaagaatatttttgcaaccgaggaaatttggaatgcgattaaagacaataaaacagttggtgtgattgaagaagatccagaacatggcatcactaagattgcagaacccgttggtgtcattgctggtgtaacaccagtcacgaatccaacctcgacgacgatttttaaagctgagatcgcgattaaaacgcggaatccaatcatctttgctttccatcctagtgcgcaacgttgttcggctgaagcattgaatgtcattaaagctgcagcagttaaagccggtatgccagcagatgcactcttatatatcgaagaaccaagtattgcagctacccaggctttaatgaaccatgaaggggtcgcaactgttttagcaactggtggtcctgggatggtgaaagccgcttattcaactggtaaacccgcactgggggttggggctgggaatgcgccagcgtatatcgaagcttcggcgaacatcaaacaagccgtcaatgatttaatcctctcgaaatcatttgataacgggatgatttgtgcttctgaacaagccgtaattgttgatgctgaaatttatacggcagtgaagaaggaattccaagcacaaggggtttacttcgctaaaccaagcgaattatcagcactcaatgacgcagtaatcgacccagataagaatgcggtccgaccttcaattccaggccaatctgctgctaaaattgccaaactagctgggatcgatattccagaagatacgccagttttaattgctgaaattaaaggtgttggacaccaatatccactctcacatgaaaaattatcacccgtacttgcgatgattaaagctaaagatcgcgaagatggcttgcaactctgtgaagcaatgctagatcttggtggtcttgggcatacggcttcgttgcatacaacggatgaagctttaccactcgaatttgcaaaacggatgaaagcatgccgggtcttagtgaatacaccatcagcacaaggtgggattggtgatttatacaatgacatgttaccatcattaaccttaggctgtgggtcatacggccataactcaatctcccacaacgtttcaacgatcgatttgttgaacgtgaagacgctaaccaagcgccggaataacatgcaatgggtgaagttgcccagcaaaatctattttgaaaaaaattcagtcaactatttagaaaaaatggcggacttgcataaggtttttatcgtcgctgatcaagggatggtcgacttaggttacgtgcaaattgttgaagacgtcttggcgcgccgcacagatcaagtgcaggtccaagtatttgccgatgtcgagccagatccatcaaccgataccatttataaaggcgccgaagtgatgaaacgcttcaaacccgatacaattgttgctattggtgggggctcagtcatggatgcggccaaagggatgtggttattctatgattcagaagatgccgacttctttggcgctaagcaaaaattcttagatattcggaaacggacttacaagttcccaaacctcgatcggacgaaactaatctgtatcccaaccacttctggaacgggttctgaagtaacgccgtttgcggtcattactgatagtgaaacgcacatcaaatatccattggcagattatgcgttaacaccagatgtggcaattgtggatagtcaattcatcgaaagtgtgccaccccgcgtggttgcgcatactgggatggacgttttatgccacgcgactgaaagttacgtatcagcgatggcgtcaaattatacaaaagggctcagtttgcaagccattaaattagtgtttgataacttacaagcgagttatgcgggcgataagacagctaaagccaatatgcatgatgcgtcaacaatggcgggaatggcgtttgccaatgcgctattaggtatcaaccattcactggcgcacaaactgggcggcgcgttcaatttgccgcacggattgatgattgccattacaatgccgcatgtcattcgctataatgctaagacaccaacgaaacgggcactctgggctaaatacagttacttcagagcagatgaagattatgctgaaattgcacgttatctcggtttaccaggtaaaacgactgaagaactggtggccgcttacgcagatgctgtgactgcattggcggaaagtatcggcatcaagatgcgtttacgtgataatggcgtgacaaaggccgactttgatcgccacgttgatgatttagcagaactggcatatgaagataactgtacggtaaccaatccaaaagaaccattaattaaagaattgaaagggattctcgaagcagaattctagcaaattgaccaagtgatttgctagaataagtggtttgagaagcccgaccacaaatttaaggcggtagactgaaacaaatcggtctaccgcctttttttgttgctgaaaagagattaattttttactatttaagggattaaattgaagcttaatggtatgaaaattattacaaataaggcataatagaaagtagacattcatttagttcagggataactaagaaaagtttgtcgacaaacttgattaaggatctggatggcaatgacacccaataaagaagactatttaaaaattatttttgaacttggtggcgacgcaaagaaagttaccaataaggaaatactagcgggattgaacgtttcggcggcatcagtcacggaaatggtcaataagttagtgaaggaaaactacgtcaaccacacaccttaccaaggaattcaactaacaagtgaaggcgcccgcgaagcagccctattagtgcgcaatcatcggttatgggaagtttttttagtcgacaagttacattatcaattcaatacggtgcacccagaagcagaacaactcgaacatgttactaatcacgacttggctgaacggttagctgatttcttggggcatccaacgcgttgcccgcatggtgggattatacccaatgccaagggggaattcgaacaacaaagtcacatcgcacttgaaacattacaagtgggtgaaacggcgattatcgatcgcgtattggatgataatgacttattaaaatatacactggaaatcggcttgtcagtcggtgacagtgtgacgctccaaaaggttggcctcttcgaaagtccgttgactgtttttaataatacgagtcaaacagaaatccaaatcggcctcaaagcggcacaacacatctttgtgacgccacaaaattaatttatatgaaagtggtgtgagatatgcacacagatttagcagcactctttattatttttggtggttccggggacttagcccaacggaaattataccccgcattatttaatttataccggaagggttatttaaaagaacacttcgctgtcattggaacagcacggcggccatggacggatgatcattatcacgaaatcgtcatgacagctttggacaactttgatgaagatcaagcaactaaagaagctttcgtaggtcatttctattatcaatcacatgatgtgacggacgccaagcactacgaaacattaaaggctttagcaagtcagttggatgaacaatacgaattacaccaaaatcggatttattacatggccatgtcaccacggttcttcgggacaatcgcaagtcatctcggatcagaagcgctcctaacggcggatggctttaaccggttgattatcgaaaaaccatttggtcgcgattatgaaagtgctaaggcgcttaaccaagaattgacgcaaacctttgatgaagaccaaatctaccggattgatcactaccttggtaaagagatgattcaaaatatcgttgctttgcgttttgggaacggtctattgagtggtgtatggaataatcaattcattgataacgtccaaattacgttggctgaatcagtaggggttgaagaacgcgctggctattacgaaacatcgggggccttgcgcgatatgttccaaaaccatatcatgcaagtgatcggaatgcttgcaatggaagtgccggttaactttacggcagaagatgtacaacgtgaaaaaacacgtcttttcagaagtattcaaccttactcaccagcagaaatcaaacaaaactttgtgcgcgcccaatatgctgaaacatcggtggatggcgaaaacaaaccggggtatcaacaagaaaccaacgttgcgcctgattcacaaaccgaaacatttgtcgctgggaaagtgatgattgataacgaacggtggtgtggcgtaccattttacgtccggaccggtaaacgattggcacgtaaagaaacgcaaatcaatatcgtcttcaagaagactggcgtcaatatttttgctgatgataagtcagatcgttcagcaatggcacctgatgtcttaacaatctatgtcgaaccggaacaaggcttttcattaacgattaatggtaaagaagtcggtcaaggattcgccttgaaacctgatcaattggcttaccaatatgatgaacagatgttggctgacagtccagaagcttatgaacgtttgattttagaagcgctcaatggggatggcacgaacttcacacattggcatgaattagccgcttcatggcaatttgtcgatgcgattcgtgaagtctgggatgcggatcaaacgccactaccaggttactcaatcggttcaatggggcctaaagaagcaacagatttactggcaacaacaggggccgaatggatttttgatcccactcaaaataattaaattaaacaagtcagcaaagtctgtgtatgagatgctcatgccaggcttttcttattgaaagaagtacgtcatcaacgggtaacttctgagcatttacagcacttgacgaattggcgacggaatcgccgatttggcaagtgaggtaaagcggaagaagttgttgataaaagcacgttaaaggaagaagtgcgttaattcgcggttagcctttgagcatttgcctaatcagacggataagcgccaagggcgattatttggctgatgtagcaaagcacagaaggttacgaattaaaagcacgttaaagaaagaagtgcgtcaaaagcggaacaatgtgcctgaaaaagcatgttgaaaaaattaaggaggggtaacatggcagagctgttcaagattccattagaaaatgatacgagtcgcaaaatcattcacattgatatggacgcgttttacgcatcgattgaagagcgtgaacagcccgacttacgccaaaagcccctcgtgattgcccgtaatccgagtgatactggtggcaaaggggtcgtgacgaccgcgaactatgttgcccgacaatacggtgtgcactcggcgatgagtgcgcaaaaagcagctgaactgattccgaatcaccaagccgtttttaaggcgcccaattttccgctttatcaatcggtctcggaacagattcacacgatttttcatacggtaaccgataagattgaaccgattgcttttgatgaagcgtaccttgatgtcacggaaaataaactcggcttggcacacacaattgatgtggtcgcctacattcaaaaagaaatccttaaagaaacccaactcgtcagctcggcggggatttcgtacaataaatttttagcaaagatggcatcggattaccgcaagccagcggggcggacactcgttttgccggaacaagcgattgcctttttaagtcgcttgccaattgaaaaattccgtggggtcggtaagaaaacggcgccgcgaatgcaagaactcgggattttaacgggggcggacttgcttgaacaatcagaaatgatgctgatgcaaaatttcggcaagcttggctacggcttatatcggcacgtgcgcggcatcgataatcgcccggtcgcctaccaacgtgaacgcaaatcaattggcaatgagaatacttacgggcaacccctaatcagtgaagagcaggtgcaagttgagttgaagaagttagcgattgaacttgaacggcgtttacgcaagaatcaaaaacacggtttgacagttgttttaaaagtgcggaatcgccaatttgaaactattactaagcgtaaaacatttaacgaatatgtcggcaaggcagctgaactcgaggcgatcgcttgggaaatttggcaaaccatcggccatgcagaagatggcgtgcgcttgctcgggattacggtgactaacttggcaccgcaaacatttgaaaacatcacgttaccgttatacgattgggagcgtgaatagttgagtttcctttgtttttgtgcgctaaaaccgatatactattaataactatgtaaatctgataaagggtggtggcgttgagtggcaactaagcatgatcaaattttaatgtacatcgaaaatttaccaattggtgacaagatttcggtgcgctcaattgccaaaacactctcggtaagtgaaggaacggcttatcgcgcaattaaagcggcagaaaataacggcctggtcagcacaattgaacgggtcggtaccatccgcattgaacagaagttaaaggggaagattgaaaatctgacctttgaagaaatcgttcaagtgattgacggcgaggtccttggtggccgcgctggtttagacaagttgttggacaaatttgtgattggcgcgatgcaaatcgatgccatcacgcgctacattacgccaaagtcattgatgattgttggtgatcggacggatgtgcaacgcttagcacttgaaaacggggccgctgttttgattaccggcggttttggcacttcggcggacgtcattgcattggccaacgacttggctttaccgattttgcaaactgcctacgatacctattcggtggcggcattgattaatcgggcgttgaccgatcaattgattaaaaaagaaatcataacggtggctgatatctaccacccacttgctgaaatccacacgttacatgctaatcaaacggtagccgactacaagcaattgagtgcggcggtaaaacaatcgcgttttccagtcgtcaacgaacatatgcgcctcgttgggattgtgacggtgaaggatattttagataaaccggccacgatgaccttggataaagtcatgaccaaggaacccgcgagcgttaaaaaatacatgagtgttgccagtgtcggccattcaatgacttggaatagtttagaagtgatgccagtggtggcggacaatttagaactagaagggttaattacccggcaagatgtcatgagcaacatgcaaacggcgcaacgccaaccgcaagtcgccgagacgttttatgatcagattgtcgaaccactgcgtcctagtgaaactgtcccagacttttatacggcggcatatgaatatgaagtgacgccccagatgacgaataacttagggacaatttcgtttggtgtactgaccgaagcggtttcggcagcttgtcaacaaatgctccagacgcaacatcagcgctattcaatgattgaacagatcaacctccattatttacggttgattcaaatcgacacgcagattcagattttaccacgcttgctcgaaattggacggcgttcagctaaaatcgatgtcgatgtttacgccaatcatgtgattgtggctaaggccctcgtcactggtcaactcttagaaagaggttaataaatgacaactccagaacaaattattgctaaaattgaaacttacgatacgattatcatccatcgtcatgtcaatcctgatcctgatgcgattggctcacaagttggcttagctgaagtactgcgtaacagctacccagacaagacgatttaccaagtcgggagcgacaccggtaacttggcatggctcgcaaacgttcaagaaattgaaccggctgcttatcaaggtgcattagtgattgtgactgatacagccaactcacctcggattagtggtgagacgtttaacttaggcgctgaattaatcaaaattgatcatcatcccaacgatgatccttatggggatttaaactgggtgttacctgatgcctcaagtacctcagaaatcattattgacatcgtcaataacagcgaaggccacttacaattcaatcaagcagctgcgcgtgttttatatgccgggattgttggtgatacggggcgcttcatgtttaattcaaccagtccacataccatggaatgtgccgcccaaatgatgacgtttgatattcaccatgataagctcaatcaaaagatgaacgaaatcacgttggaacaagccaaattacaagggtacttattcgatcaacttcaagtgaacgaccaacaagtcgcctacttagtggttgatcgcgcaacccaggaccggttacatgttgaaccgcaacaagtacactcgattgttggaacacccggtcgtttgaaaggggtattaacgtgggtcatcttcgtgcaacaagcagatgacacttaccgtgtgcatttccgctcaaagggcccaatcattaatgaactagcgaagcaacatgatggcggtggtcatccactcgctagtggcgctaaggcagctgatcaagctgaaatcgacataattattgcagaattatcagcgctagccgcgcagtacactgaatagacgcagatccagatttaccggattcaaacaatagaaagcaggactttatggataatcaatttacacaatttaatctaaaacccgaaattattgcggctttagacgacatgcactttacaaaacccacggcggttcaacggcgtgtgattccagccatcaacgctggtaaaagtgttatcggtcaatcacaaacggggagtgggaaaacccacgcgttcttattaccccttttaaataaactggtgcctgaaaaagacgaagttcaaatcgtcatcacagccccaagtcgcgaattggcttaccaaatctatacggctgccgaattaatcactcaacacatgacgggggatattcggattggtcgttatgttggtgggactgacaagcaacgccaaatcgaaaaactcgaacaacatcaaccacagattgtgattgggactcctggtcgaattttagatttaatcaagagcaaggcgcttaagatttatacagcgaagatcttggtcatcgatgaagcggatatgacacttgacatgggctttttgaagccagttgatgacatcgctagtcgtttgccagaagacttacaaatgatggtcttctcagcaaccattcctgataagttacaacccttcttacaaaaatacatgcacaatcctgtgattgaagaagttaaaaacgaaactgtgattagcccaacaatcgacaactggttagtgccaacgaaggggaaagccctcaaccaaaccatttattcattattgacgatgggccatcctttcatggtcttggttttcgctaatacgaagagcaaggttgatgacatccaccgttatttacaatcacaaggcttgaaagtcgctaaaattcatggcgatattccaccacgccaacgtaaacggattatgaaagaaattcataacttagactatcaatatgttgtggcaactgatttagcggcccgcggtattgatatcgaagggattagcatggtcattaatgctgaagtcccacgtgaagatttagaattcttcattcaccgggttggtcggactggtcggaatggtcttaaaggaaccgcgattacgctttatggtccagatgatgaacaagccgttgcacaaattgaagcaatgggcatcaagttcacaccaaagacatttaaagatggcgaattggtcacatcatatgatcggaaccgtcgtaaaaaacgggtagctaccacgcatgaattagatgtcggcatgaaagggatggtcaaaaaggccaaacttaaacgcaaacccggttataagaaaaagattaaagcagccattaaacaagatgcacaaaagaaacgccggattgaacaacgacttgaattacgtgaaaagaaacgtcaaaacaagaagcaaaatagctagttaattcataatcgaggtggctgtgatgcatgaaaatgacttacaattactgaactggttatcgttatccgaagaagcacggcgcgctaattttggccaggtgttgcgctactttgttagcccgctgattccaattgaagcgattcagagtgagaccgcaacgattggcactcaagtatttcaaacttacagtgcccggctagctgggcagcagtttatttttatccccggccaagctaatgtgcagttgggatggcaagcaggggcagcccacttagcaccgagtgagtggtttgcacaaactaaacgtacgttaccagttgatcaaggactcgtttgggcgacgcaagcggatgtcgatcaatacgttgatcagatgacatcagaatatcggattgttaatatggcaccgatgttagtggcacaaacaccaatttcaagtgagtgggtactccaaggcgagtatgaaacgacaacaggacgttttaatggaaaccaactagttgggcgtcagtttttggcggaaatccaaaataccttgtttcgggcgcggcgggaacaaaattcagctgaaacacttgaaagtgcgcacctaattttacaagcgggtgggcgaccagattgttaccaagtgtttgaaaaaactaatggtgacgaaagtgaactacgccagacattgcggcggcgcggttttgatctggtgagtgttgatcagtatgaatggcttaaaggtgcagggagtaagacgttgtggttaagtggtaatcacttaccacgaccgactcagcgccagcagatgccatttgggttacaagcaacagccgctgacggttatgaacttactcaagatccacttgtttataagggtggtgcttgtgtgacagggggacggtatagtttggaacaatggttgcctgaagcacccgcctatgaatctgggattcaaacggcggcattgggcaatccgacgcttcagtgctactatcggcctgcgattaccgttaccttggattagttgacaattcagcaaatcttttttatactttggaagtgttgggatatacgcaacgaactgacggagacaggaacgcctttctagactgagagaaggtgccgccattggttgacgtgctccccaacatcacaaacaattcaataaactcataaagaggttaacgactaacatcgttgcaatcaaggtggtaccgcgcttttgcgtccttgaaattgcagcggtgttttatttttttgaaggagcaaacatgatgaaaaaactaaccagtgcgcaagtgcgccaaatgttcttagatttctttaaagaaaagggtcatgatgtcgaaccaagtgcatcgcttgtcccagatgatgatccgacattattatggattaactcaggggttgcgaccctaaagaagtatttcgatggtcgcattgtacctaataatccacggattaccaatgcacaaaagagtattcggaccaacgatattgaaaatgttgggaagactgctcgtcaccatactttcttcgaaatgctcggcaacttttctgtcggggactatttcaaagaagatgcgattccatgggcttgggaattcttaaccagcgacaagtggattggtttcgatcctgaaaaattatacgtgacggtttatcctaaagatcaagatgcgcaccggatttggcatgaaaaagtcggtttgccagaatcacacatcattgaagttgaagataatttctgggatatcggtgaaggcccctgtggccccgattcagaaattttctacgatcgtggtcaaagcttcaacaacgttagcgaagatgatcctgaaaactatcctggtggcgaaaacgaacgttatctggaagtttggaacatcgtgttctcagaattcaaccatttaccaaacggcgaatatgttgaacaaccccacaagaacattgatacggggatgggcctcgaacgacttgtttcagtgattcaagaagccccaaccaactttgaaacagatttattcatgccattgatcgaagcgacagctaagatgagtgaccacaaacaatacggtcaaaatgcagctgatgatatttcattcaagattatcgcagatcatgcgcgggctgtgacgtttgcaattggtgacggtgcaatgccggccaatgaaggtcgcggctatgtactccgccgtttaattcgtcgggccatcttaaatggtaagaaactcggcatcaacgacgctttcatgtacaagttagtaccaatcgttggtgaaatcatgcaaagctattacccagacgtattagcacaaaaagaattcatcgaaaaagtcatccgttctgaagaagatcgtttccgtgaaaccttgaatgatggtttacgtttattgaaccaaacgattgacagtgtcaaagctgctggtcaaagtgaaattgctggggcagatgctttcaagttatttgatacgtatggtttcccaatcgaattgacaactgaatatgccgaagatgaaggcttaacggttgatcaagctggtttcgaaagtgaaatggcacaacaaaaatcacgtgcacgtaatgcccgtagtgatgaacaatcaatggggatgcaaaacgaacttttaatggatatcaaagtggaaagtaccttcactggttatacaacgcttgaaacagaaagtaagttaagcgtcatcttacaagataatgccgaacaacaaacgattaagagtggtacggcgcaattaatctttgaccaaacaccattctatgctgaaatggggggccaagttgctgatcaagggatcattaagaacctagctgggcaagtagtcgctaaagtgactgacgtgcaatacgcaccaaacgggcaaccattacacaccgttgaagtgctcgaagaaatgattagtggtgtccactatgtcttatcagttgatccaaccttccgcggtggcgtcattaagaatcacaccgcaacgcatttattggatcaagccttgcgtgatgttttaggcgaacatacgcatcaagctggttcattggttgaacctgactacttacggtttgattttacgaacctcggtcaagtcacaccagatcaattagccactgtggaaaaaattgtgaacgaaaaaatttgggctgcactacctgtgaatactgttgaaaccgatattgaaacagctaaacaaatgggggccatcgcactctttaccgaaaaatatggtaagacagtccgagtggttcaaatcggtgattactcaatggaactttgtggtgggacgcatgctgctaacactgctgatcttggtctattcaagattacgagcgaatctgggattggtgccgggacgcgccggattgaagccgtgacttcaaaggcagccttcaagtatttgaatgacaaacaagccttattaaatgaattagctggtgaattgaaagttgctcaaaccaaggatttacctaagaagattcaacaattacaatctgacttaaaagcagaacaaaaagaaaacgaacaactcaaagcaaaatttgcccaacaacaagctggcaatgtttttgaaaatgtcgaaacagttggtcaatggcgcttagtggctgctgatgcaaaagttgccggaatgaacgaattacgacaattagcggatcaatggcaacaaaaacaaatttcagatgtcttagtgctcgcaacagttgcgggagataaggttagcttgattgtcgcggtcgcacctgatgcgattaaagcggggattaaagccggtgatttgattaaacaaatcgcaccactcgttggtggtggcggtggtggccgtccagacatggcccaagctggtgggaagaatccagctgggatcgcagatgctttggcagctgctaaaacagctttagcgaacgcttaacttataacgggattgtcgtcaattttttattgattgcaatcccgttatttttttgttctttttgttaatcaatttagcgaaatgtgttatagttatctctcatccgcattctgctaagagaggggagagttgtactttgtcctgttttcgagtagaatatggttgtataagtagcgaaaagttgaggtgttgagagatgaatctagataaaacagtccattttgattttggtaaaaatagccccaagaatgttcatgaaacattaacgacggtctatcagacattagaagagaagggctacaacccaattaatcagattgtaggttatctgttgtccggtgatccagcatacattccgcgctataatgatgctcgtaatttaattcgcaagcacgaacgtgatgagattatcgaggaattagttaaaaattatttggataaggaaacgacgaaataatgcgcttaatgggatttgatgtaggatcaagaacggttggcattgcgattagtgatctattgggctggacagctcaaggggtcgagattattcgcatcaatgaagatgaatcagaatttgggttagaccgcgtcaaggaattggttgcagaacatcaagtgactggttttgttttggggttacccaagaatatgaataattcgattgggccacgggcgcttaaagcgcaagaatacggggcaatgctgagtgaacttttcccagagattccggttgattacatcgatgaacgcctaacaacggttcaggctgaacgcatgttagtggaacaagcagatacgtcacgtaagaaacggaagcaagtgattgataagcttgctgcggtgatgattttgcagaactacttggacgcgcacggtcgcttaacacaaggctaataaataaaacaattaaggagttttgatgaatgactgaagataacaagaacatccaccaagatgaagaacaacaaattacactaatcgacgaccaaggtaacgaggaattataccaagtgctctttacatttgattcagaagattacggtaaatcatacgtgctattgtacccaacaagcgctgaagaagatgaagaagttgatatccaagctttctcattcacatcagacgatgcaggcgatgccagcaaaggtgacctattcccaatcgaagacgacgaagaatgggaaatggttgaagaagtactaaacacatttttggcagacgacaacatgaaataagtgcgttcaaaccggttatactttgaggactagcatagtcccgtgaatgagcgacgaagtcgatcgtttgcgggacgtagctagccgcagaagtatggtttgaaaagtacgttaaagaaaagaagagcgtcatcaacggggaacttctgagcatttgcctaacttagcgaattggcgatgcaatcgccgatttgataagtgtagcaaagcacaggaagttgttgatgaaagcacgttatcaccatctatttcaaaaagggtcccgatagcaattaattaaattgcagtcgggaccctttttttatgtggagaaggtgtgggttgaaatgtgctttttaaagctgactcttgtgcttagcttcgtatcgcaaacgaccgactttgtcggtcattcacaacactgtgctaatgctcagagtcaacccgctttaaacgcactttaaacgtgctcttacaggcatatttctgcgcttaactaaatttgccaaatcagcgattacatcgccaattcgtcaaatccagttaatgctcaaaatatcaccgcctgtagtcgcactctataacaatttcttcgctttttccgtgttaataaaatgcaatttagcgaattcgcctaggtaatcgatgccaccttgtgcgagtaaatctgcggcgatttggttaactgcttgatgattgccgagcggaatttggcggcccgcttttttagacagttcaagcattgataggttggcttggtggcgcgcaatgattgaagcggcagcaacggcgaggtgaaattgttccgccttggttgagaaataaacgttctcgcgtaaaacaaccggttcattcttcaaatagttgtagtaaatgccgcgtggttcgaattgatcaatgaggatgccagcgggtttttcgggttggattttttggaggactttgaggagtgcgaaattatggctgatggccttcattttttcgatgttcattgtggcgtgtacttcattgtatttcggtggcatgatgttgacgatgtgataggggagtttagccatcatcttgattgccatctgatcgatttgtgcatcggttagcgttttggaatccgcgacacctaggctattgacgaacgccagattttcttggctgacatagacggcggcgatggtcagcggaccgaagtagcttccgttaccaacttcatctgagcctaaaacggaccatttggcaaaatcagctggtaaaacatcgcctttggcggctttaggcttagtacggctagcagattttgctttgctaggggtagcggtgccccacttagcagcttctcgttcggcactagcgccttggaaaagtactttgccagatttatagccggtaatgcttagtccattggcttggtgcgcaaaaacggcccccggcggtagttgacggttggtcggataatttttttgaatagtagttaattgtgagggtgtcactttaatgactgcttgcatacgattggctccttaatgagtggcaaatgaagagattcggagtaaaattgccactttcccttatttcatgataaaatagttcagttgaactagcaaataaaattagagtgcgactgcagatggtcatactctgaggattagtagcataccgtgaatgaccggcaaggccgatcgtttgcggtatgaaactaaccggaagagtatatctgcaggagcacgttaaaaaaagagtgcgacagcaggcggttatattttgagtattaactggatttgacaaattggcgatgcaatcgccgatttggcaaatttggttaagcgcagaaatatgcctgcaagagcacgtttcaaaaatcagagtgcgcaataagctgggtatcttctgaggattagcatagactcgtgaataagcgacgaagtcgattgtttgcgaggcgtagctaaccggaagaagatggcttatggagcacgtttcagaatactttatccaatcaatcatacacacatccacgccacaaaacgcgtatctaaggggaactcatgttaagtctaattattatcttaatgctgttatatgccatttacacaggggtcagacgggggtttatcatgcaagccgtctacacgattggctactttatcgtcttttggattgccaaagcgatgagccaaacactagggcctaagctaagtttaatggtgccatacccatcggcaactgaagacagctattttgcatttttccaaaagagtatcgggttgtcactcgatgatgcgttttatatcggcgtcgcctttgtcctcgtgatgtttatcggtggcttgttggtgcgcttcatcggactattgttgaattcattgacttatatgccaggtttgaagcaatttaacaaggcagccggtgggctcttgagtttcttggtcgtttacgtggggctctttttgctcctctacgtgctggctttagtgccagtcgatggcttacagaagacattggaaaactcgacagttgcgcgcgtcattgtcttacacacaccagtcctcacctctcaagtgacgagctggtggattgctggctaaaatggatagtgcagttggggctgacggaagtcgccccttttttagaaggagttaacttaaatgaatcataaaatattacaaacactagaatacgataaaattaaacaaatgcttcaaggccatgccatcacggcgtttggtcaagaacaaatcacacaattaacccccgctaacgatgcggaattgattcaagaacgcttggaccagaccaaagatggggtcgatattgaacggctaaaaggtggcattcctttgccacagttagataatattcgtccgcacttgaaacgaatcgaaatcggtgcgactttaaacggtaccgaactcgcgcaagttgggcgggttttgcgcgcgacttctgcggttgtgcgtttctttgatgacttagaaaaagatgaattaaccttaaaggcgttgccagacttagttgcccaattggtgactttaccacaactaactgaaaagattagaagttctgttgctgatgatggcgccgttttagacacggcttcaaccaagttgcgtggcttacggactggtttaaaacaattggaaggccaaatcagatcgcggatggcaagttatacacacggtgctaaagctaaatatctgagtgatccgattgtcacgattcgaaatgaccgctatgtcattcctgttaaacaagaataccgtggccaattcggcggcgttgtgcatgatcagagtgctagtggtcagacccttttcatggaaccacaagccatcatggaattgaataaccgcttgcgccaattacaaattgaagaacaacaagaaattgaacggattttggcggaattatcggaagccatcatgccagaacgccacaatattttagccaacgctgaattattggggcaactcgatttcgtcaatgctaaggctcaacttgctaaagcgttggaggccactgaaccgctgattaatttagaaaaccatgttgaactcaaacaagcacggcacccattaatcgacccagctaaagtcgttgctaatgacatcgcgattggggcggattatcaggccatcgttgttacgggtcccaataccggtgggaaaaccattacgttgaaaaccttaggcttagtccaagtgatggcccaatctggcttatttatcactgcgcgtgaggagagccaagtcggcgtcttctcggatatttttgctgatattggtgatgaacaatcaattgaacagaacttgagtacgttctcagcacatatggaaaacatcattcagattctccaacatatcgacgatcgtagtttggtcttgctcgatgaattgggggcagggactgatccacaagaaggggccgctttagccatcgctatcttggatcaaattgggattgttggcgctgatgtcgttgcctcaacccattatccagaattgaaaatttacggttacaatcggccacaaacgattaatgctagcatggaattcgatgtggctaccttacaaccaacgtaccgtttattaattggggtgcctggtcgtagtaacgcgttcgatatttcaacgcgcttagggttaccaagctcaatcgttcaacaagctaaacaattgatgaacgatgaaagccaagatttaaataatatgattaccgatctcgaaaatcaacgtaaggcagccgaaacggaataccaagctttgcggcatgaattagcagaagcgactgacttgcatcaacagttatcaactgcttatcaacaattcttcgaagaccgtgaaacagaaatgacgaaggcgaaagaaaaagcgaatgcgatcgtcgaaaaagctgaagttaaagcagacaaagtgattaccaagttgcgggatatgcagatgaatcaaggcgcccagattaaggaaaatcaattaatcgatgcgaagtcggaattagggcaattgcaccaagaaacaaccttgaagaaaaacaaagtattgcaacgggcaaaacgacgtcaaacccttaaagaaggcgatgatgttttagttacttcatacggtcaacgtgggacattagtccggcaaatcgatgccaagaactgggaagttcaaatgggcattatcaagatgaagattgctaacgaagaccttgagaaacaaaaagtcgttgaagataaccgacctcaacggcatgtgacaactgtcaacagcggtggagcgcggtatgttaaagcccaacttgatttgcggggcaaacgctacgaagaagcaatggctgaagttgatcaatatgtcgatgcggccttgttagcgaactaccaacaagtgacaatcgtccatggaaaaggcaccggtgcaatccgccaaggtgtccaggactacctaaaaggcaatcgccaagtcaagaaatacgaatacgccccagcaaacgcaggcggcaatggcgcaacaatcgtaacattcaaatagagtgcggaagcaggcggttatacgccgaggattagcataggcagacgaatgaccaacttgttggtcgtttggctggtgtagctaaccggaggagtttgcctgctggagcacgtttacgcccccaatccaaccagtcctttctggttttgattgggggtgtttttttaggcttgttaaattaaacggggataaaataatccgtttgtaacgaataataagcgagttaagttgttatttacgccatataggagtatcatgataaataatatgttttgtacaattgaatggagggcgaagaataatggttgaagtattaacagataaaaattacgaagaagaaacaaagagtggcgttgtcttgacagacttctgggcaacttggtgtggtccttgtcggatgcaatcacctgttatcgaatcattggcagaaactaacgacaaagttaagttcagtaaaatggatgtggatgctaatccagaaacgcctgctaatttcggaattatggcgattccaacgttagtggttaaaaaagatggtcaagttgttgaaaaaattactggcttccataataaggaacaactagaaacgattttggcacaatataccgactaattatgaaaacacctactatttagtaggtgctttttttatgtgacagcgtgtgacaaaaatgttagtggttgtttaataaacgttgtggtaactttaatgatgaacaaaatgatgaaaatcaaaaagagagagaaagagatggtgaaaaaatgggtcaaaaaatacttaatttttggaataaaccggccgtcaatttcattggcaaaaccataatttattttgttattctgctaattctactttatttatatgattacagtggtatcggtagtcctaaatttatctacaatgaattctaatgaaggagcgtcgttaaaatgaaaaagaatatcattcaacaaattgatgcgattgcaattgaccaaccacaaactgtggcttatcaattaggcacgacgcaacacacttacgccgacttaaaggctgcttcagaccggattgctcatttcattcaaagccaagacttgccagctaaagcaccggtgattatcttcggtggtcaaaacttcgagatggtagcaacttttctaggtgctgttaaagcaggccatgcttatattccggtggaacaacattcagatccagcgcggattaaacagattgaatcagtcgcaacgccggctactgtcctatcatgggctggtgaaacagcgattgatgttaatatgcccgttttcgcagaacctcaattgacagatgtgattgcaaacggagcaaccgattatgatgctagccaaagtgtgcaagggaatgagaatttctatatcatcttcacgtcagggacaacagggttacctaaaggcgttcaaatcagcgaaagcaatttacaaagtttcgttgactgggccaacccagctttcaatgttgcggataacagccgcgttttaattcaagccccatactcattcgatttatcagtcatggatttatttcccgggttatgctcaggtgcaaccctcgtcgttttagaaaaagctgtgacggacaacttcaagacgttatttgaagtcttgccaactcttaaggtgaacgaatgggtttcaacaccatcttttgcagaaatctgcttattatcaccaacatttgatagtgaacatttcccagaattaaaacaattcgtcttctgtggggaagaattaacgcatcaaacagcaacaaagttaatcgaacgtttcggtgatgcgcaaatcttcaacacatacggcccaactgaagcgaccgttgcgatgacgagcatcgaaattacggcggaggtcttagcgacttacgaccgactcccaatcggctacacaaaggctgatactcaaactgtcgtagtggacgaacagaataatccagtcgcagttggtcaacctggtgaactcttaatcagtggcccaagtgtttcaaaagggtacttgaataatcctgaaaaaacagctgcagccttcttcgaaaaagacgggcaacgcttctaccattcaggcgatttggtcacccaaaacgaagatggcttgctcttttataaagggcggaccgacttccaagttaagatgcacggttaccggattgaactagaggaaatcgaccaccacttaagccaattagcagccgttcatcaagcatgtaccgtaccgcgctacaacaaagcccatcaagtcacccaattgattgcctatgttgtgccagcagacggtcaagaagcgggcaatgatttaacgaagacgttaaaagcagaactcgctgaaaatacgatggactacatgattccgcaacgatttgtttatcaagaaaaattaccattatccgtcaatgggaagattgatcgtaaagcgttgattaaagaggttaatggcaatgcctaatttacaaccgtacgcgaatccgaactactttctcattctaggtgcggcgttaattccgttagtgattggcttacttaacggcaaacgttggcatgtttatgagacacttgtctcactgctctttttgatcctaatctttgacggggataaggttcaccagggaattgccttgattggttacgtcctgttcgaaggagcactgatttggggatacactgtctatcgtcaaaagcacaataacacctggctattcgatctggctgttatcttagcgattatgccgctagtgattgtcaagttcgtgccattcttaaatccgggtagtaattcaattcttggcttcttggggatcagttatctgacatttaagtcagttgggatgattatggaaacccgtgatggcagtattaagaaatttgaaccatggttattcttacaatttatgctatttttcccgacgatttcatcaggaccaattgaccgttatcgtcgtttcaaaaaagattacctaaaagttcctgatcgtgaccattatctcgacttactgggcaaggcagtccacaacttcatgttgggctttgtgtataagtttatgctcggttacttattcgggaccgtgttactccctaaagttgcgcatttagcaatggcgagtcgcggtgggttccttgatatctcatgggggcttgttggttacatgtatgtttacagtatgtatttattcttcgattttgcgggctacagtttattcgctgttgcaacaagttatgtgatgggtgttgaaacgccaattaactttaacaagccatttgcatcaaccaatatcaaggaattctggaatagatggcatatgacattatcattctggtttagagattacatctacatgcgcttagtgttcttcttgatgaaacataagattaccaagaacaaggtcctcattgccaatctcggctatttaacactcttcttattgatgggcttctggcatgggttgacatggtactacattgtttacggcttgttccacgccatctggatcatccttaccgatgtctggttgcgtttcaagaagaaacacaaggatcacattatcagcaatcggtggacgaactacttagcaatttttgcaacgtttaacaccgtttgtctcagttttctaattttctcaggctttttggaccggttatggttccactaagacctacacactaaaggagcgatttaatcatggacgtagaaaatacagtagtagaaattttagcagatttaacagggaacgacgatattaaagacgatatggatatggaattattcgaatcagggacattagattcaatggcaactgtgcaaatgttacttgaattacaaggccaattagatattgaagtacctgtttcagaattcgatcgtgaagcatggtcaacacctaacaagatcattgctcgcgtaaaggaattgcaataaaatgtttaaacgtttatggcaaattttcggcccggttttagtggccggtctctgcttaacagccttattactatcacctcttcgattaggacgacctagcgaaaagacgttgtcgacagcggcgacgtcattatccgccaatgtgctaaaaggggaagccatcaaagatgctgcatttaacgacaactacattccgatgattggttcatccgaactatcccgaatggacgcgttacatccatctgttatggcaaacaagtatgattggcaaaataagccattcctactaggggcaccagggactcagtcattgacccactttttatcacttcaagcgactggtaatcacttgaacggtaaaaaggccgtcgtcgttatttcgccacaatggtttgtaccacaaggggtaaaacctgagatgttcgatttcttctattcaccactacaaaccagttatttcttaatccacgcgaaggattctgaaagtacgcggtatgcagcgaaacgaattctagaactcacaagtgatacaaccaacggggtaatgcgggatgcattgaagaacaaagctttaggcatacctttaacggagacgcaaaaagtatacattaataatgtgaaacgcccagcgttacaacatcaagatcaactcttcagccaattattcattcggggtcgtgaacgcgaattgcgtaaaggcttgaaggtgttaccaaaacaacctgataacatgcaacttgatcaagtcgcaacggaattaggacaaaaagtaacgggtgataatccgtttggcattcaaaatagtttttacaaaaaacgggttaaacccaatgttggtaaattgaagggtgaacaaagtcactttaactatgaaagttcacctgagtttgctgatttccaattgatgttagattacttcgcagcccataaagtatctgttcaattcatcattccacccgttaatgcgcgttgggccgcttatacagggctctcacaagcgatgttgaatcgttttgataagaagattcaatatcaattgagaacgcaaggcttcaacaacattgttgatatgactaacgacggtaatgaacaattcttcatgcaagatacgattcatcttggctggcgtggctggttgaaagttgatcaaaaactccaaccattcatgagaacgaaaaaagcaaaaacagtgcactatgacatgtcaaacgacttcttaagtcgcgactggcaaaacgtcagcggcaataacgtccatgactttgattagagtgagacagagccggttatcacttgaggattaacacgtttaatatgctaagtattcaaaaagggtaggaacaaaatttaattttgttcctaccctttttttatagcacatgcttatctgtgttttctatgcatttctcgtcgacttggtaagtctgccacgcgggttcttgtgtagtgtggtgtttcttcagaagttggcttgttttctggttccaccggttcaggaacaactggtgtttctggaacggattctggttctagtgtgggagcagccacttcttcaggggctgcttcaacaggttgtgtcatcacaggtgctggttcttcttcaacagattctgattcacttggtacagatgcgacttgtgatgcatcaaccgttaaatgaatggcttcgactgcttcgtcttcaattggtgcttttgaatctgtttggacgaaaatcgttacgttttttttattttcaatggttgctttggcttcagtcacaatccgcaattgttgttcgaggatttgggcaacgaagccggcttctaattggaagtcaggagtatcgaaatccgcaatccgtgaagcgacaatcgggcctgttaattcgaagaagtattgttccttcttctgtttcttaagactgagatggccgaagttgatttgttcgaagaaggcacagaggtcttcgaaagaatcgagtgggaattgcaaagcgagttgcttaccggcccaatagctgatggcgtcattttcggccccaagaattgatggtaacaagatatcccgtaatgttgcctgtgtcagatatgatgcagtttgtggattttgggcgagttgttcatagcgtgattgagtcacagtggcactcctttatggttcgttttttataagtactcctattataccgcgaaaactctttattttttataaaaattaacgccaactgtgaattgccggccgtgcccgttgttttagttgaattttgcaccgaaaaaagagaaaatagaagttacgagtgtatcctgaaatgaaaagagaaatctaatatgcaaaaacaacccattggttttatggattcaggtgtggggggcctaaccctcttaaaagaggcgcttaaacgtctacccaacgaagacatggtctttatcggggatcaagcgcgcctaccatatggtgaaaagccggcggaaaccgtgcgcaaatttgcgtggcagatgaccaattttctacgggggcaaaatattaaagcattggttgtcgcctgtaataccgcaacggcggccgccttacctgatttacaagcgcaattgacgattcctgtaatcggtgtgattgcaccaggtagccaagcggcattggcaacgacccgtaatcggcatgtcggggtaattgccacgaccggaacgattaacagtggcgcatatgcctatcaactaaaggcactcaaaccggcgacacacgtcacgagtttggctgcgccaacttttgtaccgatgattgaagcaaaccaattgagtggcgaaactgtgcaaaacacggttgacgaaaccctcgcgccattaagcgggacgggaattgatacgctaattctcggctgtacccacttcccattattaaccgcggcgattcaaaagacagttggaccggcagtcacgctggttgaccccgcgcatgccgctgttgatagtttgattcaggcattacaagatcgcaatcagttggtggccgatgcaacagctgggcaactacacacctatacgaccggatctgtaaccaatttcgaagcaatcgcgcgtcaatggttagcaatcccaacccttgaagcccaacaagttatcattaaggaggaaaaaaacgatggtccgaatgaataatcgtgctgataatgatttacggccagtgcaagtcacttggcgttttctaaagcaacaacccgcttctgttctatggcaacgcggtgataccaaagtgctcgctgctgttcaacctacagaaggttccttgcaagtcaatggcaatggcataacagcgcaccaattagaatggttgcaaacgacattacgccccttattggcaaccgaagcactcactatcaccgtaacctgtcttgaagatggtggcggcttattagcagaactcttcaacgctgtttattgcgcactaaccttattaccaaaaggcaaaggccccaaacaagtcgctgcagccgtcacagcagcgatggtcgctggtgagtcactcggtgacccagacgccgcggaaagcgacctagcgactagcttggtgacgatggtggccacaccgcaggaacaaatcatcgcccttgaactcggcggacaacaagcagtcaatagtagtgaattcaacgaacttattttacgtgcgagccaaggtgtgacgcgaaccaatgatcaacgtcaagccagttttgaacgcgccgttcaaccgaatatccaagtggctgataccgatgaacaaacaatcgtgattgccacgaagaatccaggtaaggcccgcgaattcgaatccgtcttcgcagcggaagggattcaaatcaaaacattattagattacccagaattgccaaacattgatgaaactggttcgacatttgaagaaaatgctcgcctaaaggcggatcaaattgcagcgatcttacacttacctgtcttggcagatgattctggtctaatggttgatgaactaggtggtcgtccaggaatttattctgcacgcttctctggtgatcataacgatgccggcaacaacgcgaagttgctctatgaattaacgggtgtgcctgctgaaaagcggaccgcaaccttccatacaacattggtttttgctaaaccagaccgaccagatgaagatttagtcgttgaaggtaacgtgaagggccaaattctaggtattcctcgtggggataacggcttcggctatgacccacttttctacgtgccagaattagatgcaacgatggcccaactcacggtggaacaaaaaaataaaatcagccaccgcgcaaaagcaattgagaacctagaagataaatggaaagaatggatcaaaaactagcgtgcgacggcaggatcacgtttagatttggctgatgtagctagccggaagaatatgtcggaagaagcacgtttcaaaaaaacaacgccccttggcgccgaaaggactgtttagtatgcgttttgttgttgtgagtgatagtcatggtgatcgcgatattctcgtgcagttagtggcgcagtatcaagatcaaccagtaaccatgttacattgcggggattctgaattaacaaccgatgatcccttgtttaaccaaatgaccgttgtgcaaggcaatatggatttcaatggtcaatttccagcacaagttgttgtcccagttgcaaatgaacgaatcttcttaacgcacgggcacttgtatggtgtaaatggcgatttaatgcggcttttattagcggcccaagaaagccaagctaatctcgcgttctatgggcatacacaccaattggcctgtgaaatgcacgaaggtgtgctgctcttgaaccctggcagcattgcccaactacgggggcagtttcgtgacttgaaagggacatacgccgttgtagacgtcacacctgaccaatatcaaatccagtactacaatcgtcggttcgaacccgtttcgcagttacactttacatttaaacgcgcctaattctaaagactatccaaagtttagtagctatggatggtcttttatgtttgctctttgttacaatctaaaagtagcattagtttattggaggccaagtgatgatttcagatgcattttcgaacttattattagaaaataaagaacacttcttaattcccggtgaggttgttgcgagtgttcaagaaagcaactccttggaacatgcgtttattctactaaccacggtgaaatattcgagcattcccgtcttagacaaccattcgaagttcaaagggatgttgacgatgccgttaattaccgagacgatgctcggattgaataacctcagtttcgaaaatttgcggaagctgaccgttaaagatgtcatgcaaaccgatgtcgtgacgattagagatccatatgatattgaagaaacgctccatctcttagttgatcacccctatctgcctgtgatttcggatgaaggggagttcacagggattgttacccggcgcgaaatgatgaaaagcttcaaccgagtagcccataatatcgaaaaagaataccaaatcgagccaataaccgcagaaacaacccaaaaaggacaataagggttaaaaaagcgtcttccagacaccaacgaataatgtttggaagacgctttttgttttggactgaatccagcttaattactggtatatcaacatttgtaagcaaaattaagttagacgtaatgactttaaaaaatccatgatagtaggtcataactcatgagttgtgaacctcttatatcgttacatattgttcttgggtaatgatggttagatgactaatattcacccctgcataggcattcttgggagtctagcctagggggaagtagtgataccgtcaaagttatgcctgatgaacatagtcaaaatatcgaaaaattatcatgtaacaaagttttaaaggcattagaactgggaggaaatttgatatgcaaaagagagtcgtccatctaattttagcaattattttcttaaccactacaatcgtacagtcatttggtagcgcattagtggtggctgtgaataaggagacggtgacagccaacacgacttctaagattgtgaacccacgaagcgcaattgaaggcgcgagctcagtttctgaaagcttagccagttcgttgcaatcacaatcgacaagcagtgcttcaacaagctcagatagtaagtcgagttcaaagagttctgattcagaatcgagttcaagtatttctgagaaaaaggaaagcgttaaatcgaacacgagtaaatcggtgattatttaaccacgatactggctttcagatttgactgatccgggcagtgaatatccagacttttcgattcctttatctggtcaaaacaacgttacaacgattgaagatgtagctaactattaatctcagtctgcaatttatttaacgtgtataatatttcggaggtacgcatattaaataatcgactgagaaaggtgtgcgaccactttagagaaatggtacaatataaaatgttggcgattacatttaaggagagtagcgtttatgattaaatttccagagcattttatgtggggagcagcaacatccgcacctcaatcagaaggatactccctaagttatggtaagtccccatcaacctgggacaaatggtttgagatgcaacctgataagtttaatagcgatcaagggcctgacacggctagtgatacttatcggttgtatcgtgaagacgttgaaaatatgcaaaagattggtttgaactcatttcggacatcgattgcttggacgcgattaatgcccgatggcaaacatgttaatcaagtagcggttgatttttatcgggattattttaagcgcttacgtgatgcagacattacaccgatcattaatctgttccatttcgatatgccttggtggctaatggaaaagggcggttgggagacacgcgaagcagttgatgcctttgcattctacgcaaaaactgcgtttgaattgtttggtgacttggttgatcgttggacgacttttaatgagcctatcgtgcatatcgaatgtggttacttaacgggctatcattatccagacattgttgacttcaagaaggctgttcaggttggctaccataccttgatggcgcatacagcagctgttgctgaatttagaaaagtgaagccggatggtcagatcggcattattttaaatatcacgccagcttacgctaagagtgatgcaccagaggatttaatggctaaacaaaatgctgacttactactcgctaagagttttctagacccaactgttttgggcgttattccagaagaattaattaacctcttaacaaaacatgagttattaccaatgacgaaaaaaggcgaccggcaattgattgccgatcattgtgtcgattttatcggcgtgaactactatcaaccaatgcgggttcaagcaccagagaatccgaagttcccagcacaaacaccggaagacttatatgctaattatatttggccagaacggaagattaatccatatcgtggatgggagatttatccagaagcattgtacgatgtggcaatgatgatgaaaaatgattatcacaacattccgtggtacgtttctgaaaacggaatgggtgttgccgatgaagaacgctttatgggtgaagatgggcaaattcaagatgactatcggattgaatttatgcaagaacatctgacgcaactacatcgtgcaattgaagccggcagcagttgttttggatatcatacttggaccttcaatgattgttggtcttggttaaatggttatcggaatcgttatggtttctactgtgttgatttggaccatgaggcaaagcgcacgatgaagaagagcggtcgatggtaccgtgaattgagcgagaataacggcttttaggccaaaaaaaaagaaccgacgcatcagtcggttcttttttgagttaaaagatatctgtttgaacatatttattgtgtaattcaaagaaatcataagtcgctaagttttcaatatccgcttcaccattgaagatggccgttgcagaaccagccaacatcaggttaattggtaaattatcacggaaacgagcgagaatcactggtttattgtgggcaaaagcataaccacattcccacatggtaccggaatcaggttcgaattcgccttcttcagatttaaaatccataacagcgactacgacgtctgcttggtcaatttgacgcgtatcgacattaaaagtagcgacttgccattcgaaagtaccgaattctgcatcaggataagggtgttggcctggtttgaaaagtgaatcagcatcaatcgttgggtttttaatgagtaaatcagccacttgatctaaccgatcgttttgttcggggctaaaaaatgggccagcgagataaacttgtttttttgagggcatgagagccgcctttctcgataatgttcgcgttttttgtagtaatttaagcttaaaaagctatttatttaattatatacgtacgaaaaataatattcaatatatgttctgcaaaaaaatacgtaaaaaaaaactgcgtaagcagttttagtgaacgaacaagtaaataaccaatagaataaaggccacaactaagattgtgaacatgtaagttgaagcggtactaacagctttcttacgttcctttgatagtggtcggttcgctagtttcttgtattgcttcttagcaatttcaaattgacgtttatctttcatttgtatccctcgcttgtttcagtgtccctattatagcatggaatacagtggattgataattattgatgataagactggactttcaatctggaacaagctacgataatgctatattggagtataaggaagtaacaaatcatgaaattaaagacaactaaacaaacaactggacataaattatcagttgcagggattttgattacgatgggcgtcgtttacggtgatattggaacgtcgccattatatgttatgaaatcaattgttgaggggaatggcggtttggtaaacatcagccgcgattttatcatcggcagtatttcgcttgtcttttggacgttaatgttgatgacgaccatcaagtacgtcatgattgcattgcgggcggataataatggtgaaggtgggatttttgcactgtacactttgattcgtaagcaagctaagtggctcgtgatccccgcgattattggtggggcgacgttattagcggatgggatgttaacacctgctgtgacagtcacgacggcgattgaagggttaaagggtttgccaattaatgggaacgttttaattaataatcaagatcaggtgattttattgacggtctcaatcttatcggtcttatttttcattcagaaatttgggactgatctaatcggtaaatcttttggtcccattatgttaacttggtttacctttattggtggcattggtttggttaacttaatgggggatctaacgatgctcaaggcactcaatccgtattatgcgattgaactactgtttagccctgagaataaggtggggattctaattttaggcagtgttttcttggcaactacgggggctgaagcactttattcggatatggggcacgttgggcggttgaatatctatggtagttggccatacattgcgctttgtttagtgttgaattactttggacaaggtgtttggttattacaacataaagatattgcggcatatcaacatatttctgatttcaatccattctttgaagtgatgccagcccaattaaaggtcccagcgattttactggctacaattgcggcgattattgcatcacaagccttaatttcagggtcatataccttagtatcagaagcaatcaagttgcgcctcttaccacgaattaaggtcgattatccggctaagttaaaagggcaactctatatttcaatcgttaactggattctatgggcggtttgtttaatggttgttttctattttaagaactcagcgcacatggaagctgcctacggtttggcgattacgattacaatgttaatgacaactatcttgctattccattacttgggacgccgcgagaagaaatgggtattggcttatttggtactcatcttcttcgggacaattgaagttattttcttcatctcaagtgccgctaaattcatgcatggtggttacgtgacagtcttaattgcggcgtttattctatcgatcatgtttgtttggtatcgtagtaatacgattaaggaaagtaatactttcaaggcaagtacggtttcattactagcttataaacaacaactacatgatttgcgagacgatacagcgttagctatgtatacgactaatttggtttatctttcaaaaccacagaataaaccatatgaaaagaatatggttaagaagaatattctttattctattttggataaacgaccaaaacgggcgcaagtttactggtttgttgcggtcaatgttactgatgaaccgtacacggcagaatataccgcagatacgcttgggacggactacattgtcaacgttcagttgtatctaggctttaagatggaacaaaaagtgaacatctttattcgtcaaatcattcaagaaatgattcatcggggagaattaccagcacaaccacaacgctacacaacaattccaaatcggaacgttggcgatttctcgtttgtgatcatgcaagaagatttatcaccagcaactcaaattcgagcaatggataaagggattgttcaaatgcgtttatggttagaaaaattcactgatacaccggcttcatggtttggattggactatagtgatgtgtttgtggaacgtattccgctagttcttggccgccaaaaatcggtctctaagtatcatttaaaacgtcgtgaataacatcaataaattagtttataacgcctaggacagaagattgtcctaggcgttatttgtgtaatagcagtcaagtaagcggtgtgcattacaattagcgcgggaattgccgtcattttgttacctgtttgtcatcaattgttatggttttgacatgtacaagcgaatataagatggtatattagtcccacgttaataaatcaaaacaacaaggagcacatctattacatgaaatcttttaagacattattgcttagcgctacattgacaacggctgcaacagcaggattacttttcgttggtcaatcaaaagcaagtgccgctactacttataccgttgcaactggggatacgttatcaacaatcgcccaaaaatttgccggtaacacagatttagtcaatcaaattgccacaacaaacaacattcaagatatcaacatgatttttgtcggggaacaattaacaatcgacactgaccaaacagcaacccctgttcaaacgacaacgccagtagttgttgcacaaccagccgctgttcaaacaccagcaccagttgttcaagcacaacctacagtgcaagctgcaccagttcaacaaacagctgctgttgcaccgacaactagttcagcgaaagaatggattgcgcaaaaagaatctggtggttcatactcagcgcgtaacggtcaaatgattggccgttatcaattaaccgcatcatatttaaatggtgactattcagcagtcaatcaagaccgcgtcgcagatcaatacgtaacaagtcgttacggttcatgggatgccgctaagagtttctggttaagtaacggttggtattaaaatttaaggttcctttaacgctcaatcaaatttaatttgattgagcgttttttgttctctgagaaatcacacttgactaaatcgaatgtatgttcgtataattaagaggacataagatgaattaaagaggtgtgcctgatgcatacgaataaagaagtgattacgctagatcaaacaggattgagtttatatttaaatggctttggagttttagaattgcggcgattagcggtgaatcatagtgatgatttgattgactcaatgaattattactacaaccgcgataagtttccgcaatttatttatcgtcatctatcagccgtcaccttgattgagattaatcggtggcaacgcgaattagatgaacaagtgcgtcagattcaagttggggtgaagagtcgtgtatgactatcagaatgaaccacgccgcgtgattttaatgattgattcgaaatctttttacgcatcagtagaggccgttcggttgaaactgaatccgttaaaggctattttggtggtgatgtccacggagaaaaacacgggcagtggtttagtattggcagccagtcccatggctaagaaattatttggtatcagtaacgtaacacgtgcccgggatgttccaattcatgataaacggttaatcattgagccacccaagatgaatttgtatatccaagtgaaccagaagattaaccgtatttttcagcaatttacggcagaagaagatattcaaccgtattccattgatgaatcgttacttgatgtcacggatagttggcaactctttggagcgacgccgtacgaagtcgcacgtaaaattcagctggctgtaaaaaaagaaacgggcatttatttaacggtggggattggcgataatccgctacttgccaagctcgcattggatcttgaggccaaacggaatcacagtttgattgcagaatggcattatgaagatgtcccagataaactgtggccagtgacccagttagatgatgtctggtcaattgggcatcgtacggcagagaaactgaatcagaaacacattcattcgatgtacgatattgcgcatacaaatccctatcggttaaaacaagaaatgggtgtcatgggcgcgcagttgtttgcgtttagttgggggattgatcgggccgttgtacggcataaatataaggccaaagagaagtcttatgggaatagtcaggtattaccacgcgattattttatccaagctgagattgaagttgtgattcgggaaattgcagagcaagtggctgcacgtctcagggcgcatcacaaggcgaccacggttatcagtctggggattggcttttcatttgctgcaaaagaggatgcatcgcgtggtggttttgggcgttcaatgaagattgatgcgactaatgctaatcagcaactcacaaaacatgccatccaactttttcgtgaagaatggcaacacgaatcgattcggcatattagtattgcgtgcagcaatttggttgacgatagtgcggaacaattagatatgttcgacacacagtttattaatttgaaaaagcagaaattagatagcacggtcgatgaaattcgcaagcgctacggttttacatcggtggtcaaattgtctagcaaagtaaaaggtgcgactgcaattgagcgtgctggcttagtcggtgggcatgctggagggaacgcctatgaataatgatgaatatgatcccaatttggttaatcaatttttgaagtatgattattatgatcgtggcatgatgaaatggcaaggtttctatttaagcgatcatacggcagtgttagataagaataaccgcgtacaagatcgtaagcgcaatgaaaaacacattgaggcgatgactgctgagatgattgctaataccatcaatgacgcaattgttaaatgttatccggttcaaatcgacaaagcagaacgttcaatagaaggtattgtacccagtaaggtggaaggtttaatcagtggctggtttggtagccaaataattgtggcaaatgaagccattttaatagaagaaatctacgcaataaaaaaactagccccctaactaaagcgtcaggaggctagcttttttacacgttttaaacaaacaaaaaagccgctaaaccttagtttaacggcttttctgggttctaggctgttttaaatatcacccgtacggggatcgaacccgtaactccgccttgagagggcgacgtcttaaccgatttgaccaacgggcaatgttcggaacaactaatatcttagcgaataaagcctgtaatgtcaatggttaattgactctagcgaggctaaatgaagattttatagttacgacgattaatgttaataatttccttggtcatagtgcgatttgtttgtctctttaaatgtttcaagatattccgaatatagtcctgatggtttatcagtagatttagaatatcgttatcaattgtgacttcaagcgtcctgcgtgaatctatccaatcaatcacaacgtggtcttgatcatatacggcaactttcccgtcaaataatttttcgatttctgcttttttcatcattggaaccacctccaagaatagtatagtcctcttttaaagatttgttaaaaatcataattgacaacgtctggagtgtgcagtatcatagtattcgttgatgatattgggtattcgccaaattggtaaggcaccggactctgaatccggaatttataggttcgagccctatatacccaattaagatagaaagagctgagtaatcagctctttttttgtggctttatatcgatagggcaaattatttgtagttctctgtctcaaacatgatttggatcgcatagcgatccgcaatcttagctaaagcccgtaaattgaagaaccaatagtgtgctaatagcttacttttgaaaattaatgttgtgtcctgagcaccggaaatttgaatcattcgatcatccaatgcgacgtttaaatctaaatcatttaattttaaaactttcattttgatcacctcgtcttattattacgttaaatagggcggttatttttgaaagagggttaattaattcaaaatagcatatttagcatttttatggactgtaatccttggtgttataaccttttaggccgattacaagtcaattaaattgtgggcttcattacaaagttaggtgaaattgccgtcattttgttacggatttgtcatcaattgttatggttttgatatttactaacggatttaagatggtatattagtcccacgttaaacagatagaaaaatcaatttaaacaataaggagtccattcaaaatatgaaatctttaaaaactttactttacagtgccgctttaacaaccgtcgcaacaaccgggttacttttcgttaaccaatcacaagccagtgccgcaacaacttataccgttgcaaatggtgatacgctttcaaccattgcgcaaaaattcaatggtagtacagagcttgttaaccaaatcgcaacaactaataatattgctgatattaatatgatctttgttggtgaacaattaacaattgatgctgatcaagtggcaacaacaccagcccctgttgtaactcaacaagtagctacacctgttcaaacaccggcccctgtagttcaagcacaacctgcagttcaagctgcaccagtacaacaagcacccgtagctgcacaaacaacaactacaactacaacgagttcatctaaggaatggattgcacaaaaagaatcaggcggttcatattcagcacgtaacggtcaattaatcggccgttatcaattatcagcttcatacttaaatggtgattattcagcagctaaccaagaccgcgttgcagatcaatatgtaacaagtcgttatggttcatgggataccgctaagagcttctggttaagtaatggttggtactaaactaaaataatgacaacgtctaggccattggtctgggcgtttttttatggtaagttagtgattggaagtgtaaactgaaagtagtataaagagtgaggcttgatcagatgaagattttaggagtgttaggcagtcatcaacgagatggggtcaatgggcaacttttagatgccgttttagcaggtgtaaaaccggaagatgacgttgaagtgatctttttaaatgattatcaaatattaccagatgctggcaaagccaatccggtattggatgaactggaagctaagttattggcagccgatgtttggatactggctgcgccaacttattgggggtgcaatgtcgggtgtgatgaaaaacttcttggattgcgtgcggcaacggttagtccgatttaatcgggcgggagatgcgttaccagatcgcttcaaaggcaaaagttacattacgattagtagttgttatgccagtccagctgaggaattggttactggtgtgactgacgggacttttagaacttttgataaagtcttgggggcagctggacttttaaaaatccgggaagttgtccagacaaaaacgtatggtttaaagacactttcagcgcagaaacaagcggaatgtcgccaagtcggcgcaagcattcaatctaaagcaaagaggacggatgatacagtgaaacggtatatacaactatttggcatggtcgcctgtgcaaccttgattacgatggtactgcaacaattagtgaacttagtgttgccaattggccagttttggcttaattatgtgtcattcgttttaatcttcttcattctattggcaagtgtgttacacttttttacggtggttaaacaccgcagacattaggagggattcagatgaaaattgcattaattgcacatgatcgtcagaaaccaacgattgtgaaactggcgacggcttataaacctattttggcgcaacacgaattatttgcgactggaacgactggtcaaaaaattattgaagcaactggcttgccgattacacggtttaagtcaggtcctctagggggcgatcagcaaattggcgcgttgatttcagaaaataagatggacctggtaatctttttgagagatccattgactgctcaacctcacgaaccggatgtgaatgcattaattcgattatctgacgtttatgaagtaccgttggcaaccaacgtcgggacggctgaagtattgctgcgcggtttggacttaggactggtcgactttagaaaagtggtccatggtcaagatgtcaattcaattaatttatagtgtaaagcggattgtaccttatttcgactgtgaaatagtgcaatccgttttttgatttcaattttaatttgcgtataataagagtattgatttggagggattgggttgcaaaaagaaatagggtttcatgatcggctaagcacggcgatgtttttaacgtttcttggtggcttcttagatgcgtattgtgtgattttacgtggtggcgtctttgcgagtgcacagaccggtaatatcgtgttcatcggcttagatatcgcaacgaaccagtgggcacaacttcctgaaaagatattacccattatttcatttgggtttggggttattattgtgcagctggcgaagcggcattttaacactggtgggttgaatgtttggcggttgtggttattaggttttcaaattattgctttagtagtagttggttttttatcaaccgcgattcccaacatgtttgtgacaccgattctgtcgatgtcgatggccatgcaattagcgagttattcaacggttaatggctatccatatgcgaatgcttttacgaccggcaattataagaaattaatcgaaaatacttatctatatttagcgaccaaagaaaaaaactaccaacaaaaagcccggtacttcgggttaattgttggtagcttcttcattggtactattagctcagggttaattgttaagttaatcaatgtgcgcactgcatggatagctgcgattatgttgacggtgttctttggttttcaattgtattttacagaagaagtgattgctgagaccaaacatatgcaacgttagccgtaataataaacaattaacatggcaatgaaatatgcgccgcaaacagcagtgctaatccaactggcaatcataatgatgggatgcgcaataaaggcacgcatgacaaagagaaacaaggttaaaatagcatacttaatacagctgacctttagctgttcaaaatgaggcttattcaaaagaaagatccactaaataaagttgacggtcactaagatgggcggtagtaatccacacatcttggaagccgtctttttgtttttcttcggtttgttgataaaaagtcgtcaataagtcatggtgttctttgacgtactcggggtcaatccggttaacgtgtagccgcatatcagggaacagtttctcggcatctggcagatcgacttggtcactaatgccaaagcgaatcacgttcgcatattgaaacggttctagaaccacttcatcaggatgttcttggatgtaagttaagatggttgttaatgcagacatagtcatgcttcctttctagtcgtttaaaaaatcgtaaagccagcagtaatgttattcaacatgtgtaaggcaatattactcttaatattatgggtgcgatagtagacgatagccagaattaggccaagcagtgcttttgaaatgaaataaatcggatcagttgcgccgtgcatcaatccgaataagatagcacttaacccgattgagatgattggtgtgcctgggaaaaaccaattcattaggaaccctctgaaaagtaattcctccataatcggacctaagaatagggcgtatggtagcatgaaaataccaatcgtctgaaagactgaggttagtgcatcaacattggcattaccggtagtatgcataaacgggattgtaccgttattgacagcaaccatcgcgataaagccaatcaacattgtccaccaagtctgtttggtgaagggttggtcataacgcgttgatttaattttttggtagtaataccacattagggcagtaatgccgatagtcgtgattagaaaaagccaaccaaagactaaaattagatgggttgtctgttgggccttagggagcaatgataagccactgacaatcattaaaggaacttgttggatgataatcagaagcaaaaagacaatcccatgtttgacgtgtttgataagcaccacctccgtgtgcttatcatagcatattcccgtgaatgaataaaagattgaatgcggattgctgttcaaggcacgatgctttatgttagattaaaacagttaagaaaggggtgtttggatgtatttagcaattaaagaaattaaacatgctaaattacgttattcgttgatcatttttacgatttttctaattgcatatttaatctattttttaacggggttggcatatgggctagccaataataaccgttcggcaattgatcaatggcacgccaaagaagttgttattagtcagtatgcgaataaaaacttggctgcttctgaattagatgttgatcaattaccctctattaaaggtgcacagaaaaatcatgcgcaacttgctcagatgatgggtgttgtgagtagttcaggtttaagtaagcaaaatacgagtgtttttggtatcgattttgatgcttttttgaagcctaagttgcaaaaaggacggtatcctaaaaaggcaaatgagattgtggtcgacgacggcttacaaggaattgctttaaatcaacaaattaaattgaatgggcgtcaacaaaagtacaaaattgttgggattacgacgaaccaccgctataatacgcaaccggtgacttatttgcggttgaccgattttagccgaatgcgctacggcactgatcagattacgcgcattaatgctttagtattaaagggaaacgcgcggattaagacaacggatcagctgaccaaactgacaattccagaattaatcgataagattccggggtatgggccacaggttaagacgtttggtttgatgattggcgcattgctagtcatcgtcgcctttatcgttgggattttcatgtatattattactattgaaaaaacggccgtatacggggttatgcgagcacaagggatttcaggtggccaattagttggtagtttaatgtggcaatctgtattcttaggggtgattgggattggccttggtttgttgtgtaacgcattgacaacattggtattaccagcggcggtgccgtatacaaataatcctttactaattggggccttttctgctgttttacttgtgatgacagtcattggcgctttattctcaatttggcggattctaaagattgatccgcttgatgcgattggaggggcataggatggctttaatgcgtttagaaaaaatcgtcaaaaaatttggcgcaggcgaccagcaaaccacggctttagatcaaatcgatttaacgattgaaaagggccagttcattggtttaaccggaccatctggttctgggaagacgaccttattaacgattatgggtagtttacaaggcccaacgagtgggaagctcttttttaaagatcaagagattagtcaattaagcgaaaaacagcggtctgcattacggtttaacgatttcggctttatattacaaagttcgaatctggttccatttttaacggttgaagaacaattcgaactagtcgatcgattacgtgaaaagcaagcgccacaatcagctgaacaactattaaccaatttaggtgtttgggatcaacgacgtcagtacccaacgagcttatctggtggtcagcgtcaacgagttgcgattgctcgggcattgtatggtcagccagatttgatttttgcggatgaaccaaccgctagtttagatagtaaacgggccttacaggttgctgagcagctggctaaaatcacgaaagagacaggacagacgattgtgatggtttcccatgatgaacgcgtcttggattatacagatcatcaatacgtgatgcgcgatggtaaactgacataatgcgactcataatcataaattttgactaatgttggttagctatcctatcatataggtagaccaataagaaggagtgattttgaatgacagataaagaaaagttagatggcatgaaagaccaagtaaccggtaaagtacaagaaacagccggtaaggtgactggtgatcgcgaaactgaggccaaaggtaaagcaaagggctttatgggtgaagctaaagaaaaattagcggatgccaaagacaaagttgctgaaaaagccaacgacgtgatggatgatattaaagaaaaaatggacaaagacgataaatagcgccttttaaagggaaccggcagacgatagtctgccggttctttttttgtggatttaatgcttgcatgagtgcctaagttggcgtattatgacattacgtcacaattatgacgctctgtcattaattttcagaaaggagtatcgaaatgccgaagaaaacattttttagattacctgaggaaaagcaacaacgactgattcaagctgcgcatgctgagttttcacgggtaccgtttaatgaagcatctgtcagcaacattattaaaacggcggagattccgcgaggcagtttttatcagtactttgaagataaggcggatatttttttctacgaccttagcttattacgcgacagttcaaagcaggatttagaaaagagtctgttggctgttcatggtgatctattcaaggcaattcgccaattctttgctgaaatggcagaagagattattaatggtgaaaatgcaccattttacaagcacctcttcttacatatggattataagaaccagcgcaagatgtcaccagaattaatgcatgccaaacaagtagatgggatgcgctttttagaagaaaacgtcaattacgacttgctcaagattaacgcagatcaacccgaagcgcttagaattttatttcatgagttgatgacgacggtctttcaaagtattgcagcgtattatctgcaacaagaaagtgaccatgcgattacaattgaacaggtccaagaacgcttcgaattagtattaggctggttagaaacaggggccagcaaacaaggataaggaaagaagggacacacaacatgcttaaacttgcaaagaaaagaatgtcaggttgggccgtctttggtgcggttttattcatgacgattcaggttgtcagtaacctttatttacccaatttaacctccgacattgtcaatgacgggattgctaaggggaatattgattatatctggcaagcaggctttaaaatgttaggtttttcattaattagtattattgcagccgtctgcaacgtttatcttgcggcacggacgtcacaaggcttaggccaaaaattacgttcagatatctaccggaaggtcatcaacttctcacacgatgaaatggatcaagttgggacgtcttcactaattacgcggacgactaacgatgtggtgcagattcaaaatgtggcaatgatgttcttacggatgatgattatggcacctatcatgttgattggcgcaagtttcttagcgtatcaaaaagatgcgcaacttacatccattttcttggttgtcttaccaatcatggcactcttcattggtggggtgatgtacttcgctgtgccattattcaaggcaatgcagaaaaagacagaccggattaacttagttttccgggaaggtttaaccggggttcgggtcattcgagcattccggcgcgacaagttcgaacaagaacgttttgatgaagctaatactgactacacgcaaaatgcgaagaaagtttatagtattatgtcagtgatgttcccagccatgacgttaatcatgagtgggactaacattgcgattacttggatgggtggacacttaatcgccaatcaagcaatgcaagtcgggaatttattagcgttcatgacttatgcgatgcaaatcctcatgagtttcatgatgctttcaatggtcttcgtctttatcccgcgggcgcaagcttcagcagtgcggattaatgaagtgcttgatttacacacgccgattgaagatccagcgacgcctaaaacgtttggtgatcaaccagcaagcttggctttcaaccaggtcaacttccgttatcaaaatgcggaacacttagcgcttgaaaacgttgatttccaaatgacagcgcgccaaacagtcgccgtgattgggggcactggctcagggaagaccacgttagtcaacttgattcctcgtttttacgatgttgaaacgggtgaagtgacagtcaaagggttaaacgtgaaagatgtgaccctccatgacattcaccaacaagttgcatttgtccctcaaaaagcgaacttatttaccgggacgattcgggaaaatatgcaatatgggaatccgaatgcgaccgatgatgaaatctggcacgcacttgaaattgcacaatctaaagatttcgtcagcgaacttgaaggtggcttagatagtcacgttgaacaaggtgggggcaacttctctggtggtcaacgtcaacggcttgccatcgcacgggcgttggttaaaaaagcggctgtttatgtctttgatgattctttctcagcgttggactttaagacggatgccttattacggaaagccttaaaagaagatgctgaaattcaaaagagtgtcgttgtgattgttggtcaacgggtatcaaccgttgccgatgccgacaccatcttggtcttggatgaaggccagctggtcggtaaaggctcacatgctgaattgaaggctaataacgccacatatcaagaaattattaactcacaaatcagagagggggatgaagactaatggctgaaaaaacaacaaccaatcgaccccaaggtggacatggcccaggccgtggcatgggtggtgtcgttgaaaaaccgaagaatttttggggtacaaccaaacgattattaacctacatgtctagccggttaatcggattagtgattgtgttagccttagcaatcatctccgttattttccaaattagaacaccaaaagtattaggacaagcaacgaccgaaatcttcaagggtgttatgaagggcaatgccatgcaaaaagcgggcatgccgatgaatggcttaccaattgatttcgataagattcaacacattattatgacggtgattttgatgtacttagcatcagcggttttcagtttcttacaacaattcatcatgacgcggatttcccaacaaaccgtctatgaattacggaaagaattaaaagacaagatgcaacgggtaccgattaattactacgacacacactcaaacggcgatatcatgagtcgtgcgattaatgatatggataacattgcaagtaccttgcaacaaagtttaacgcaaatggtaaccagtgctgtgacatttattggcgttatgtggatgatgctctcgattagttggcaattgactttaattgccttagtcacgattccactcagtttagtcgtcgtcgggattgtcgcaccgaaatcacagaaattcttcgcagcgcaacaaaaaagtttggggttgttgaacaaccaaattgaagaaaatttctctggtcaagtggtcttaaagaccttcaaccgcgaacaagtcacaattgatgcctttgaagaacaaaatgcattactctataaagcagcttggaaggcacaatttatttctggggtcatcatgccgttaatgacgttcgtcaataacattggttacgtcttcgtagcaattgtcggggggattcgtgtttctcacggccaagttactttaggggatatgcaagcgttcatgcaatatacgcaacaattctcacaaccaatcacgcaattggccaacttagcgaatacaatccaatcaacgattgcctcagctgaacgggtcttcgaagtcttagatgaagataacatgagtgacgacccatcagaagtgtcggcgattgttgatgaccaaaatctacttgaattagaacatgtcgaattcggttatcaaggtaaagatatcttgatgaaggattacaacttgcaagtcaaaccaggccaaatgattgcgattgtcggcccaacaggtgctggtaaaacaaccatcattaacttgttggaacgcttctacgacgtgagtggcggttcaatcaagcttaaaggtgtcgatacgcgcgatatgactcgggaacaattacggcgtcacttcgcgatggttttacaagatacttggttatttactggaacgatttgggataatttgaaatatgggaacgctgatgcttcagatgaagccattttagcagccgccaaagcagcgcacgttgacggttttgtccgtcaattacctgatggctatgagacggtcttgaatgaagaagcttcgaatatctcccaaggtcaacgccaattattgacgattgcgcgggcctttgttgccgatccagagattttgatcttggatgaagcaaccagttcagtggatacacggactgaaattcatattcaacacgccatggaacgcttgttgcaaaatcggaccagtttcgtggttgcccatcgtttatcgacgattcgcgatgccgataacatcatcgtgatgaatcacggttcgattattgaaaccgggacccatgatagtttgatggcacaagatggtttctacgctgacttgtacaatagtcaattctcaggcaacgttaaaatttaatcatgaatgacgcaaataaggccgcagataaaatctgcggccttatttttgtccgtgtttggtgtatactagtgatactgatgtagtaggaggaatttaacatgcgatttgaacaaaccatccggcaaattggagcgctagttgatgaagggattgtccctggtgtttcttatgccatcatcgaaggccctgaagtgatgactaatgtaatcgggcaggccgaattagtgccccaaaaagtgccgttaaaagctgatcagttgtatgatttagcgtcattaacgaaagtgattggcacgacgacgattgttttgcggctattggaaaaagggcggctttctttacgaacaaaagtgcatagtttgttgccggcctttaaagatcgacgggtgacggtcttgcatctattgacgcacacgtccggtttaacgggctacattccgaatcggaatcaattatcggctgccgaattagaaacggcgcttttgacgcaattaacggtcggcccaaattttggtgaaaaggttgtttacacggacattgatatgttgtatttgggctggatgattgaagccatctatcaaaaaccgattcaggatttgattcaagaactcgttttaaccccactcggtatgcaagccagtacgtttaatccggacagaagtttggcggtcccgactgaattgagtgccgaacgcggcttaatccagggcactgtccacgatccgaaaagtgcgattttacaaaatcatagtggtgcagccggcttgtttgctccattaaaagacgttgtccgctttgcccagttccaattagggcagttgaaggttgaccagccaccaatcagtcaggcgagtgttaagagtctctatcgtgattggacaccaaaacatctcgggcgctcactgggctgggatttgcgctttgagccgcaagaacaccagccactgatttatcacaccggttttaccggcacgttcatgctattggatcgcaagcggcaaacggggctgattgtcctgagtaatcgcattcatccaacggctgataatccggtctttttggaacaacgggatgcgattgtggcacaatttttagcggataatcacctagaaacaaaagcctagtcaaattcgcaaatttgcgtattatccgcttacatttgtggtaaaatgggactattgataaataaagcgcattaggagtgagtgaattgacagaacctttatttctaaaacctgtttttcaaaaaaaaatttggggtggtcgcaaattagctgaagccttcgattatgatttaccagacggcgatattggtgaatgttgggccatttcagcccatccccatggtcctagtaccatcgaaaatggcccattaaaagggctcacattagatcaagcatgggcaacccaccgcgaatatttcggtaatgcagaaggtaaagtattcccattgttaactaagattttggatgctgaagcaagtctttctgtccaagtgcacccagatgacgcttatgctgctgctcatgaaggtccaaccgaactcggtaagacggaatgttggtatattttggatgctgaaccaggtgcttatttaatctatggccaccatgccaagaccaaagcggaattaacagcaatgattgaagcaggcaagtgggatgatttactccgcaaagtgcccgttaagactggtgactttttctacgtcccaagtggcacgattcacgcattgaacaaagggattatggcgcttgaaacccaacaaagtagtgatataacatatcggttatacgattatgatcgggttgatgctaagacgggcgaaaaacgcgaactacacttgaagcaatcaattgatacgacgattgtgccgcatcaagatcccgttttgaatattcaaacagaacatgttggagattcaacaatcacgacttatgtgcaaccaccaatgtcaccatttttcagtgtttaccaatggttagtgaagggcgacttacactttgatcggacaacggcaccctatactttagtctccgtggtcgatggtgaaggcgaactgattgccgatgggcaaacttacccaattcacaagaatatgcattttgtgttaccatttgatattaagtcatgggacttaaaaggtgacatgcaaattattgcgtcagaaccgggtaacaagtaaactgaatataaccaattgcaaccgcagccgtagttgcaattttttttaatgattaaaagagtaggatgacaagtatgcaaagacaaatcgaagcaattgaacaatttgtacgaacggaattggcagcagaacacagcggtcatggattcgatcacattcaacgggtcgtgaataatgcctgtttaattcagcaaaaagagttagctacggacctaacaacgattatcttggcggccttattgcatgatgtgattgatgaaaaaatcgcgactgatgttgaacaggctcgacaaaaggtaaaaactaaactaaccgaaaacggcatacaagatggccaacaaacggcaatttttgatattatcgaccacatgtccttttcgaaaaatctcaatcaacaccaaacgctaagtttagaagggcaaatcgttcaagatgcggatcggttagatgcaatcggcgcgattgggattgggcggaccttcatgtatggtggcgcacacgatggggttgcttatgatcctgagattcaaccacgggcggaattgacaaaggaaaactatcgcgaaccgtctaccgtgattaaccatttttatgagaaattatttaaattggcagcaacgatgaacacacaggcagcgcgcgaaatcgcgcaagcgcgaacggatttcatgcaccagtttgtggatcagtatttagcggagtggacagggcaacgctaaaaaacgaaacattgatatgcaaaagggcggtaacaatatttttgttagcgcccttttggatagttgtgttctgatcgtttaaacgtgttctgtaagtcatccgaacccagagccacacgttagccatcgaccgttagccagtcgttttggagtagttcgtgggttctcttttgcaggggtaaccacaattcagcgcggaggatattgatgagggattcccagaagaggcggtcctttttttgttggtcggtaatatgtaattcgatttcttgaccactttcagtggttgcgaaaactttatcatgattttcaatccgattaatttgaacggactcgactgctggcatttgatttaacataatgattcgctcctttttataggttaaagtcagtataccgagcaagtattgtgaaacgattatcattttatgaataaaaagtgtattttttcttgcgaaatgattaagacatcaaaaaagtcgaccgcataatggtcgactttttgatttgttaattttggacgcgtttgacgccggctgcatcgacttggtaacgtgattcttcgagtggtaagtcagcgatttgttgtaaatcaaattctggaaaacgccggctaaccgcaatcgataaaagtcgtttggctaaaacaccgttgtgcgtgagaattggaccatggaagtatgaaccaaatgtgtttttataaacacaaccttcggtgccgtcatcaccattgttgccgtgaccacgtttgatgtaaccaagtggtttttcatccttgcccaagaaagtccggccgttgtgattttcaaaaccgaggtaggtttcgttaaactcacggttttcgatgacaatatcaccgataaaacgattgttatcttggctcaatgtgtaatgatcaagtgcgccgattccaggaatcttgtcgccgtttgcgccaatatagtagtgacctaataattgataaccaccacagatggcaagcataacaccaccgttttcaatgtattcggtgagggctgcttttttgtcgttgaggtcttctgagatgattttttgttcgaagtcttggccaccgccgaagagaacgatatcgtaacgacttgcatcgaaatcttgaccgatactaatgacttctgtttcagtttgaatgccaacttttttggcatagtaatcaaggactaaaatattaccaagatcaccatatgtgttcattaaattgccgtatagatgacaaattcttaatgtctgggtcatactgatagtcctttcttaatataattggcagctgccagcttcttacgtagttgtaaaacagcggtataagttgctaatacataaacatgtttggttggggctgcttcaatggctgccatcgttgcatcgagttctttagtttcgtgtaattgatctgccgtgacaccggctacttttagccggaaagcgatatcgtcaccgcgttcgccaccggtaatcacggttggaatgttgtgtttgagtaagtcttcaaactcgccatcccaaatccaactcgtatcaattccatcggcatagttagcattaagcaacattgcgagtgaaaagtcttctggatcagaactgatcatttgtaagacttggtttaagccaaccggatttttaacgagtaccaatgtgaccgctttgtcttttaattgaatgacttcttgacggccaaagattcgtttgtcttcagtgaaggccttttgaattgctttcactggaatatcaaagaatcgaccgacactataggctgcaagtgcattatagatgttgtacatgccgccaattgaaatttcaaacggttcgttgttaatttcaaagtgtgaatttgtggggtgcatctgattgatggcagtgactgcttcgtctaattcaggtcgttggtagccacaattagggcagtaaaacttcccttggctggcataactgatgaatttgtaatgaatgatgtgatcacaaacggggcacaaaacgccgtctgtgttgcttggagccatcatttcgccatctggtaagtggttgaatccgtaataaatctttggattaggaagttcaaccgatgaaaagagaggcaagtcagcgttcataatgagggttgcctcaggaacgagtttgacgcccgctagaatcatattataagtcgtgtagatttcgccgaaacgatccatctgatcacggaaaatattcgtcatcacaatcgctttgggcttgatgtagtgacaaaggggttccacattggcttcatcgacttcgaggacggccaattgccgttgtcctttttgaggatgatctgctaaaaaggcggtggtcaacccttgcatcatgttcgagccactcgaattggtcatgatatgatcgtatttttgcttcaacgtctgcacagtgagtgcggtcgttaatgttttaccattggtaccggtaatgataatcacgtcgtagttcttggttaactgctttaacacagcaggatcgaacttggttgcgattttcccggggagggagctgccacctttcataaaggtatgtaaataccaatatgaaaaacgtcctgctgtaattgcaaatgagcttttaattgtcatgcttgccaccctttcaatgttcataatcatagcataaattctcaatttggacgatataaaaacgcatctgcaaataaaataagggaaactttagaatttaatagtggcgaatattgttgcctcgctgattttcaggtatactagattaaaatgtgcttaacataggggtgtttgagagtggcgcaattattttttagatatggtgcaatgaatagtggtaagtcgattgaaattttaaaagtcgcacacaattatgaagagcagaataaatcagtgatcatcctgacgagtgggattgataatcgcgacggggtggggattgtttcaagtcggattgggctcaaacgtgaggcgacaccgattttctcggatacgaatatctttgagttggtacaatcgactaatccggatgcagcgtgtgtcttgattgatgaatcacaatttttagaacggcatcacgtaatcgaagcggcgcaggtcgttgatgatttgaatatcccagtgatggcgtttgggttgaagaatgattttaagaatgaattattcgaaggctcgaaatacttattgctatttgccaataagattgaagaaatgaagaccatctgttggttctgtcgcaaaaaagcgattatgaacttgcgaatgaacgatggcaaaccggtttatacgggtgaacagattcaaatcgggggcaacgaagcatactaccccgtttgtcggaaacactattttaacccaccggtaacacaagagagtgaaaaggaaggctagtcattcatggataaaatgtttgaacaacttgatagtttgttagaccgctatgcggaattacaggaattaatgtctgatccagaagtgatcaacgaaaccagtcggtatatggaattgtctaaagaagaagcgggtttacgggaaattgttggtaaatacacgcgtttgaagactgtcttaaacgacattgcagaaagcgaagaattgttacgcgaatctaatgacccagaaatggaagaattagctaaagcggatttaagtgagttacaagatgaaaaggaacaattagaacaagacatcaagattttgatgttaccaacggatcctaacgatgaaaagaatatcatcatggaaattcgtggggctgctggtggcgacgaagccagtctctttgcaggtgatttgttgaatatgtatcaacgctacgctgaatcacaaaactggcaaactgaaatcatcgatgaaacggctacagaagtgggtggcttcaaagaagttgcgatgatgattaccggtaaaaatgtttattcgaagttaaaatatgaaaatggtgcgcaccgtgtccaacggatcccaaagaccgaatcacaaggtcgtgttcatacctcaacagcgactgttgcagttatgcctgaatatgatggggttgacgtgcagctcgatcctaaggatattcggactgacgtttatcgtgcctcaggtgctggtggtcaacatatcaataaaacctcttcagccgtgcggatgacgcatattccaaccgggattgtggttgcgatgcaagatcaacggtcacaacaacaaaaccgagtgaaggcaatgcaaatcttacagtcacgggtttatgatttctatgaatcacaaaatcaaagtgaatacgattcaagccggaagtcagcggttgggtctggggatcgttctgaacggattagaacatataactatccacaaaaccgagtgacggatcatcgaattggtttaacgttaaacaaattagatcggattatgaacggggaattaggcgacgtcattgatgcgttaattctttacgatcaaaccgaaaaattggagcaattacaagatggcacagctcacttatcttaaagccctgaattgggcttttttatttttagaagaacacgctaaagaacgtgaagcagcgcgctttttactactcggtcgtaaacattggacgacgacccaactggtcttgcattatcacgatgaaatgccgactgccgaatacgatcagtatcaagcagacttaaacgcgtttatcgctgatcaaccggcacaatacattttgggatatgctaatttttacggacgcgattttaaggtgacgccggcaacgcttattccacgacttgagacggaagaattggtagaatggatattagatgctacacaaccaaagaaccgaccacttaaagtgttggatgttgggacaggaacgggcgccattgcaattacccttgcctgtgagcatccagaatgggaagtgaccgcaattgatatttcactagaagcgattgctgttgcacaagcaaatgcgcgccaattaaacgcgcatgttaactttatcgtgggtgattttctaaccccagtgatgggccaacagtttgatgtgattgtgtctaatccgccatatattgcacaagatgaacggcatgtgatggatgcgtccgttttgaaatacgaacccgacttggccctatttgcagataataacggcttagcgttttatgaacggtttgctaaagaagtgcgtgcgtatttaaaaccagatgggcagctttatttagagttcggttatcagcaaaaagaggcgatcgttcggttattcgaacatgaatcgaccgatgtagcggttacaatcaaaaaagatatggctaattggtctagaatggcccgtgtgggttacgatttcaatcggaatttggtatgatgtaaatcagaagtagagtaaggaaggcctataatggaaaccaagagatacacagtagaacagattgaacaagcagcagcagatttaaaagcgggcgaattgatttcatttccaactgagaccgtctatggtcttggggcagatgcgacgaatcctgaagcggttaagaaagtttatgccgctaaggggcgcccaagtgataatccgctaatcgtgcatgtagcaagtgttgcgacggttgagcattacgcagccggagttagtgatcgatttaagcaattagtcgacgctttttggcccggttcattgacaattattttgccgctaaaacatgcggcactagattcagttgtgacgggtggtttaaagaccgctgcctttagaatgccgaacaatgcggtgacgttagacttgattaaggcggccggtgtcccacttgtggggccttcagccaatacatcaggcaagcccagtccaaccactgccgatcacgttttacatgatctaaatggaaagattgccggtgtcattgatgatggtccaactggtgttgggttggaatcaacggtgattgatttaagtgttgcgacacccgttattttacgacccggtgttgtgactcaagaagccattgaacgtgtgattgggccgattatgacaaaccaccataaagttggcgcagctgaaacgccaaaggcaccaggcatgaaatacaaacactatgctccaaatgcacaggtttacatagtgccaacgccagatgaatttccggcggcggttaaatgggccagtcaacaaagtgtgccatttggtgttatggcggttgatacggtgttagggcagttatctgacgttaggtttaaagatcagttctctttaggtgattctgtagtgactgctagtcaacacttgtttgaaggattacggtattttgatttgaatcctgaggttaaaattatattagtgcaaggcttcgcaaaagagggtgtcggattagcgtatatgaatcgcctcgagaagtctgccggccaacaatactttacttcgaaataggcactattttaataggaagaggagtgattgtaaatgattgaacaaactgatccagaaatttacgaattgattaaaaaagaggaacaacgccaggtgcataatattgaactaattgcttctgaaaacattgtttccggagctgttcaagaagcacaaggtagcgtattaaccaataaatatgccgagggttatccgggcaaacggttttacggtggttgtgaatttatcgatcaaattgaatcactcgcgattgaacgtgctaaacaactttttaatgcagaacatgccaatgtacaaccgcactccggttcgcaggctaatatggcagtttaccaagcgcttttagaacccggtgataagattttagggatgaacctcacagatggcggtcatttaacccatgggtcaccgtttaacttcagtgggcaactttatcacttctatagttatggcgttgctgacgataacgaacgaatcgattatgatgcgctcgctgctaaagcggatgaaattcatcctaaaatgattgttgcaggggcatcagcatacagtcggacaattgacttcccaagattacgcgccattgccgatcatgtcggtgcctatttaatggtcgatatggcacacattgctggtttagtggcaactggtgttcatccaagtccagtgccatatgccgatgtggtgaccacaacaacgcataaaacgttgcgtggacctcgtggtggaatgattttgtgtaaagcagaatatgccaaagcaattgactctgccatcttccctggtattcaaggtggaccgctcgaacatgtcattgcggcgaaagctgttgcatttggtgaagatttacaacctgaatttacagcatatacaaaacaaattgtggccaatgcgcaagcgatggctggcgttttcgaacaatctgacttagtacgtgtggtttcaggcgggactgacaatcatttaatgttactcgatttaacgcagagtggcttaaatgggaaggaagtccaagcatttttagatagtgtccacattaccgttaataagaataccattccttttgaaaaattaagtccatttaaggcaagtgggattcgaattgggaccccagcaatcacatcgcgcgggtttaaagaagcggattgtgaattgattgcgcaattaattttagaagtgattgaaaaacacgatcaattagacgccatgacgcgcattagtgcagatgttttagcgttgacggatcattttccaatcacacaagctaaatttttagattaattaatgaataccgctagttttttgatgctatttacgctacaatagtaaacagaattttacgcggaagggagagtgactcggagaaggttttctttggagtcactctttttttgcgaaaaaaatttggactaaattcattgaatagaataggggcaaagtaaatggcaaaattcacagtattaaatcatccgttaattcaacacaaattaacgattatccggaataaggatacgggtactaaagttttccgcgaagtcgcaaacgaaatcgcagaattaatggtttatgaaatcacgcgcgatttagcaatggaagacgtagaagttgaaacaccaatggggcctgcaattgaaaaacaattgagcggtaaaaaattagccgttgtgccaattctgcgtgcaggtcttgggatggttgatggcgttttagaattaatcccagccgctaaagttggtcacattggtatgtaccgtgacgaaaaaacattacaaccccacgaatactttgttaaattaccaacagatatcgatcaacgacaactattcatcgttgatccaatgcttgcaactggtggctcagcaatcatggccatcgatgcccttaaaaaacgcggcgcaacgtcaatgcgccttgttgtactagtggctgcacctgaaggcgttaaagctgttcaagaagcccatccagatgttgacatctatgcagctggtcttgatgatcatttaaacgaggatggatacattgttcctggtttaggggatgcaggcgaccgtcttttcgggactaaatagccattaattaggtaccgataataaaagcgcgcaacacttgattttcctgtgttacgcgttttttttgccaaaaaagcaaccgttaataagtttaatcttttgatatgataatatttatggtatttgagtgcattgacaaaaaaataattagaaattagttagtatttgctttgtacttttaatttaatggtggtattatcatacttgtattgcggtgatgatttatgcttaatttttctacataaatattgctgtttttaggttcgttgtgcaactcgcgtagacgtagtcgttgatagagtggaatcaacaaataagcctaagggaggagggaattttgtggatgataaatatcccattattagcattttgggaattcgttttaatttagcaaactgtctatcggtcttagtaagtgcagttttggtttttgcactcgttttctttttatcaagaaaaattgcgcttaaaccgactaaacggcagaatattttggagtggatcattgattttacgaacggaatcgttaaaagtgcgatgcccggtgaagaaggtaaacaattttacttatttgcattcgtcatgttcatgttcgtatttatcagtaatcaacttggtttgattcttcaaattaaggtacatgatgtaacttggttgaagagtccaacggccaatccgattatcactatgtcgcttgcgatgatcgtcttagtgattgcgcactactttagtgttgaacggttagggtttggtaattacatgaagagttatattaaaccggtaggatttttcttaccaattaatatcatcgaacaatttaccaatttcttaacgttgtccttgcgtttgtacgggaacatttttgcgggtgaagttttactaagtttattagttaaaatggccttctcacatggaccagcaacgatgcttgtgacggcaccgatccaaatggtttggcaaggattctccgtctttatcggggcaatccaagcatatgtatttgtaacattatcgatagtctatatttcagaaaaagttgaaatggaagactaaaaattaggaggaaaaaacatgaactatttagcagcagctatcgcagctggtttagcagcattcgcagcatcatatggtaacggtaaggttatctcaaaaacaatcgaaagtatggcacgccaaccagaattatcagcagaattacgctcaacaatgtttatcggtgttgggttgattgaagctgttccaattctttctatcgtcgtttctttcttgatcttatttagttaatccgagtgaatctaaattttcgctttaaaaattagtcagtaagtcaaggaaggagtgtcaatagatgtttagtaatttaatcgttggtgcttctgaagcctaccttggagattcacttttcgtattagttgtctttattattttagtcgctttagttggtaaatttgcgttcggacctgtttcaaaaatgatgcaagctcgttctgacaaaattacaaacgacttagataacgccgctcaatcacgtgaagatgctgccaaattagcagcacaacgcgcaacagagttgaagaattctaagtcagaagcagttgaaattgtgaatacagccaagcgaaatggtgaaaaacaacgcgaaggcatggtcacacttgctcaagaagaagtccaaactttaaaacaaaatgctaaaaaagacatcgaacaatctcgtttagatgcgttaaacagtgcgagagatgatgttgctcaactatctattgaaattgcttctaaactcattaagaaagaattgtcagttactgatcaaaagtcattgatcaattcctatattgaagggttggacaagcaaaatgaaactagataaatatgcagtcggacaacgctatgcaaaggcattattttcccttgcagaacaagagcaacaatttgaaagtatccatgaagagatacaagcactcgagactattttcaatgacaacccaagattgggtgcagttctgactgatacgactttatctggattgaaacaacgtgagcttctaaagagcctttccggtgaatttagtacactcatgcaacactttttaagccttgtttttgactatcaaagaatggctgagatgccatacattattgcggcctacgaagatctttatgatcaaaagatggggattgcacacgctaaggtaacgtcagccgttgctttagatggtgatcaaatcgcaaagattagccaaagctacgctaaacgcgaaggtctcaatcaggtcttagtggaaagtatcgttgatccagatattattggtgggattgtactggaatcgaatcacaaggtgatcgatggcagtgttaaacatggcttagatcaaattaagtcattactattgaaatagtcaatcgttgataaagaggtgaacctgatgagcatcaaaactgaggaaatcagtgcattaattaaacaacaacttgcaaattataatgaagatttagccgttgaagaagtcggtactgtcacttatgttggtgatgggattgcacgtgctcacggtttagaaaacgccctttcaagtgaattgctagaattttctaacggttcatacggggttgcgcaaaacttggaaaccaacgatgttgggattatcatcttaggtgaatatgaaaacattcgtgaaggtgaccaagttaaacgaacaggccggattatggaagtgcctgttggcgatgctttaattggtcgtgttgttaatccattgggtcaacccgtggacggcaaaggcgaaattaaaacggacaaaactcgtccaatcgaaaagaaggcccctggcgttatggcacgtcaatctgtttcagaacctttacaaacaggtttgaaagccattgatgctttggtaccaatcggtcgtggtcaacgtgaattaattatcggggatcgtaagactggtaaaacatctgttgcgattgatacgattattaatcaaaaagatcaagacatgatttgtatctacgttgcgatcggtcaaaaagaatcgaccgttagagcgcaagtggaaaccttacgtcgttacggcgctatggattataccatcgttgtcgaagctggtcctagtcaaccagcaccattactctacattgcaccatatgctggtgcagcgatgggtgaagaattcatgtataacggcaagcacgtcttaatcgtctatgatgatttaagtaaacaagctgctgcttatcgtgaaatttcattacttttgagaagacctccaggccgtgaagcttaccctggtgatatcttctacttacattcacgtttattggaacgggctgctaagttaagtgatgaattaggtggcggttcaatgactgctttaccaatcatcgaaacacaagctggggacatctcagcttatatcccaactaacgttatttccatcactgatggtcagatcttcttggaaagtgatttattctattcaggaacacgtccagcgattgatgctgggtcatctgtttctcgtgttgggggcgcagcgcaaacgaaggcgatgaagaaggtttctgggacattacgtcttgatctttcatcataccgtgaacttgaagcctttacgcaattcggttcagacttggatgcggcaacacaagcgaaattaaatcgtggtaaacggactgttgaagttttgaaacaaccacttcacaaaccattaccattcgaacaacaaacaacgattctttatgcattaacacacggctttattgatgacgttccagttgacgatatcatgcaatatgaaagtcaattgagcgattatcttgaaagtaacgcaaaggacttgatggacactatccgtcaaaccgctgcattgccagatacagataagttagatgctgctatcaaatccttcacagaaggttttgtcggcgctgaagctactgctgacaatcaagactcaggacagtaaggggtgaattaattggctgaatctttaatggatatcaaacgaagaatcgcctctactaaaaaaactgggcaaattacgagtgctatgcaaatggtctctggtgcaaaactttctcagattgaaaaaaattcaatcgcttatcaacaatatacgaataagattcgagaaatcgtcacgcatttggctgcaagtcaattaattgcaagtgcacgtcaaaaaagtaccgctaaagcagcagaagctactaacggtacttcacagaaatcattgcggcatgacattacgttaagtaatttgttagtggaaagaccaatcaaaaagaccggttatttggtcatcacgagtgatcgtggattggttggcgcttataacagctcaatcttaaaagcaatggttgaaatgatttcagaaaaccacaagtctgccgatgaatatgctattttagccgttggtggcactggtgctgatttctttaaagcacgacaaatgaacttatcctacgaatatcgtggtgtaagtgatgtgccatcatttaatgaagtccgtgaaatcatcaaaacagctgttgcaatgtatgatagcggcgtgtttgacgagttgtacgtttgttacaaccaccatgtcaactcactgacatctgcttttcgagctgaaaaaatgctacctattaccgacttggatgtttcagaagtcactgataaagatcaagaatacatcacagaaccttctgttgatgatgccttagatgccattctaccgcaatacgctgaaagtttgatttacggcgcactacttgattctaaaacagctgaacattctgcttccatgacggcgatgaagagtgccactgataatgctaataatttaatttctgatttatcaattaaatttaaccgggcacgtcaagcacagattactacagaaatcaccgaaattgtcggtggtgcggcagcattagaataagaaacgcgggaggaaaataacaactatgagtatgggaaaagttgtccaagttattggtcccgttgtcgatgtcgaattttctttagatacgactttaccagatatcaataatgccttggttgtcaacaaagggaacgacgaatctgtcgtcttagaagtggcacttgaattaggtgatggggtaatgcgtactatttcaatggaatcaactgacggtttacgtcgggggatggctgttgaagacactggtcgtgcaattaacgtaccagttggtaaagaaactttaggacgggtatttaacgttcttggtgaaacaatcgatggcggcgaagaatttcctgcagattttagacgggacagtatccaccgttctgcacctaaatttgaggaattaaatacaagttcagaaattcttgaaacagggattaaggttatcgatttacttgccccttatttacgaggtgggaaaattggtttgtttggtggtgccggtgttggtaaaaccgttttaatccaagaattaatccataatatcgctgaagaacatggtggtatttctgtctttactggtgttggtgaacgaacacgtgaaggtaatgacttatactttgaaatgaaagaatcaggcgttttggaaaagacagcgatggttttcggtcaaatgaatgaatcacctggcgctcgtatgcgagttgccttgactggtttaacaattgctgaatactttcgtgatgttgaaggccaagatgtgttattgttcatcgataacattttccgattcactcaagctggttcagaagtttctgccttattaggacggatgccttctgccgttggttaccaaccaacattggcaacagaaatgggccaattgcaagaacgaatcacgtctactaaaaaaggttcagttacatcaatccaagccatttatgtgcctgctgatgattatactgatcctgcgcctgcaacaactttcgcgcatttggatgctacaactaacttggatcgtaaattaacacaacaggggatttatcctgctgttaacccactagaatcaacttctagtgctttggatccagaaattgttggcgaagaacattacgaagttgcttcagaagtgcaacacgtcttacaacggtatcgtgaattacaagatatcatctcgatcttagggatggatgaattatctgatgatgaaaagattatcgttgcgcgtgctcgtcggattcaattcttcttatcacaaaacttccacgttgccgaagccttcacaggccaagccggctcatacgtgccagtaaaagatacagtggcaggcttcaaaggcatcttagcgggtgactatgatgatgtccctgaagaagcattccggcttgtcgggaatattgatgctgcattagcaaaagctaaagaattgggttatacaccatccgaacaaaaaacgaaacaagcttagaaaggggcgttaatgatggcagaagaacaaaaggtattaaccgttaatatcgtgaccccaagtgggattgtctatgatcaccacgcaacattgttggttgtaccagcgatggccgggcaacttggtattatggctaatcatgagccaattattacccctttagaaattggtgagattcgcgttaaacggactgatgatccagcacgtgaagacgcaattgcggtcaatggtgggttcatggaagtgagccataacgttgcttcaatcgttgccgatagtgctgaacgggcgcgtgatattgatattaggcgtgcgcaaagtgccaaggaacgtgctcaaaacgcaattaaaacagcgtccgaacataatgatactgacgaattacgccgggctcaaattgcactgcaacgtgcgataaaccggattaacgttaagaatcacttattgtaggattcaaaaagccttaaacctgaatggtttaaggctttttttgtttcttaagattcagtctggtgggcagacaaatcctattttggtatgttacaatgtttgcatatcacaaaaggggcgttatttaagtgcaatcaatcgggttacaggcagttatttcaattattagccatattggttttattttaatcagtttttatggcttacaatcaatccggtttgagcaatttttcaaaccgaatcatatccgtcaagtacagattgtcatagtatttctcgctattgtgatgggctacaccgttagccaattctttttagaaataatcgcgcaggctaaaaatgtgatttttttagtcccataaactagcagtcttattcggagggaaactcttggaaaaattgattatacaaggcggtcaacgattagttggcgaagttcaaatcgaaggcgccaaaaacgcagtattaccaattatggcggctgccttactagcaaccgacggacccgttcaattaacgaacgttcctattttatctgatgtcttcatgatgcaagatgtattaaagagtttagatgctaaagttgagtttgatgaacaacggaaccaattaacaatcgatgccagtggtgatttgaattttgaagcagcttttgaatatgtttcaaaaatgcgtgcttccatcgttgtgatggggccgttattagcgcgcttaggtcacgcacgagttgcgatgccaggtggttgtgctatcggttcgcggcctgttgatttacatttgaagggttttgaagcacttggtgcaaccattcatcaaaatcatggttacattgaagctaaagcagaacgcctagtgggaactaatatttacttagattttcctagtgttggtgcgacacaaaacatcatgatggctgcgacaatggctgaagggacaacggtgattgaaaacgttgctcgtgaacctgaaattgtggatcttgctaatgtcttaaacaagatgggtgcgaacgtttttggcgccggaactgagacaattcgggtggaaggcgtaaccgctttacacgggacggatcacagtatcgtgcaagatcggattgaagccggaaccttcatggtagccgctgcggcaacacaaggaaatgtcttgattaaagaagcgattgctgaacacaataaaccactcctatcaaaattagtggaaatgggtgcggaagtgattgacgaagaagctggtgttcgaattattggtcccgctgaattaaaggcatgtaatatcaagacgctaccttatccaggctttccaactgatatgcaagcacaaatgacgacacttcaattacttgctaagaagacgagtgttatgaccgaaacggtatttgaaaatcgtttcatgcatttggaagaactccgccgaatgaatgcggattatcaaattgaaggtcaatcagttgtgctttatggcgatacacatttcaatggggctgaagtggctgcaaccgatttaagagctgccgcagcacttgtcattgctgggttagtagctaatggtgaaacgttggttacgaaccttcaatacatggaccggggttactatcatttccatcaaaaattacgggcacttggggcacatattagtcgagctgattttgatgctgccggtcaccggattaaacaagcaaaacgtgcataaaacagactggcggcgcctgctatttcagcggacgtcgcttttttattttgccaaatcaggatactaaaggtacctgtcttatggtataatgatttactgaatatagttctcggaaggagcaacaccaaatggctaaagatatcgggattgacttgggaactgccaacgtcttaattaacgttaagggaaaaggcattgtcttaaacgaaccttcagttgttgcgattgatacccaaaccaaaaaagttttagcagttggctcagaagcgtatcggatggttggccggacacctggcaatatccacgctgtccgtccattaaaggatggggtcatcgctgatttcgacattacagaagaaatgttagcgtattttattaataaattaaatgtaaagggcttcctatcaaaacctaatattttgatttgctgcccaacaaatattacatcaattgaacaaaaagcaattgttgaagctgctgaaaaatcaggtggcggcaaagtcttcttggaattagaaccaaaagtcgcggctgtaggtgctggcatggatatttttcaaccacgcggtaacatggttattgatatcggtggtgggaccagtgacgtcgctgtgctttcaatgggtgaagtggtcacaagtcgttcattgcgtcttgcaggcgataagatgaatagtgaaattgccgcatacgttaagaagaaacataatctattaatcggcgaacatacggctgaaacaattaagttaacaattggtaacgtttggcatgctgatgcgagtgagtcacttgagattcgtggccgggacatggtaagtgggttgccacaatctgtctcaattagtgcagatgaagttgaatcagccttgcatgaaacaatgatggaaattattgcggctgccaaagaagtgttagaagtgacaccaccagaattatctgcagatattattgatcggggaatcatgttaacgggtggcggtgctttattacgcaatatcgctagcttattctcagaacatttgaaggttccggtggtcttagcagaaaatccattggatgctgttgctttagggactggcatcttattagataatattgaacataaacgcgcttattaagccgcattctattaaagaaggattgtgattgtgtgtatcaatcaaattttgacgaacacgtcaaacccgttttaaagaaaattttattggttttcgtgctcataattattgcgttattagttggtcagatgattggttttgcaattggcggccagaatccatttgccgttttcttgcctagcacatggagtcatattattaatttcttgcagtagcatgcgctaaagtgaggtagataaattgcggaaaatattgattggattggtccgtttctatcagaagggaatttcaccattattaccaccgagttgccgatattacccaacatgttcgagttacatgattcaagcaatccaaaaacatggtgctattttgggtttaatcatgggcatcggtcgtatattgcgttgtcacccgtttgtacggggcggctatgatccagtaccagatcatttcaccgttttgcgcaatcgacagcaagacgagtcacaaaagtaagtcaaagaagttaggggttcaacataactatgtcaaaaaaagaacaaaaaattactgtcacaattgatgacatcaaacgtaatggccaagaaatgacaagcgtcatggtcggcaaaaatgaaattggcgtgattgtagaagatagcgctaagaaacgttttgaagcaactgttgaagggactggtcaaagtatcattactaagacccacgacgatgcagttaacgaattactacgggagtaccacttacaccaaggttaattcttaagaattaattagaattacagtaacccggcagaattctggccgggttatttatataatgagagcagaattgattgaaggagacttagcatgccaaaggaagtagaaacaacagaagattcctcgcgagttgattatggaatcgtcttttcagtctttatgctagcgttgattggcttgatgtcaatctatgtggcaacgtcacatgatacatcaggtgcgagttcaactcgagccgttattatgcaagctgcatggtacgtgattggtggaattgcgattgtcgcaattatgcagtttgattcagaacaactatggcggattgcaccactggcttatgggttagggattttcctcttgattgccgttttaatcttttataatcgggcagtcgccttgcaaactggggcaaagagttggttctctcttggaccaatctcatttcaaccatctgaagtcatgaaaccggcatatattttgatgttgggcagggtcgttactcaacacaatacggcttatccagaacacacggttaagacggattggatgttacttggacgaatgttactatggacacttccagtgatggtcctattgaaattacaaaatgactttgggaccttattagtgttcgttgccatcttaggtgggattgtgcttgtctcaggtgtgacctggaagattttagccccagccattgctgtcttagtcgctgttgggggcacggcccttacactagcggcgacgacccctggccgggtaatcttgacgcatctgggctttaaaacgtaccaattcaatcgaattgatgcttggctgcatccttttgataatactgccagtaccagtttacaattatcgcagagtttaaaagcgattgggtctggtcagctatttgggaaaggcttcaatcaagtgcaagtccatgtgccagtacgtgaatccgatatgattttctctgtcattggtgagaacttcggctttgtcggttcatgttttgtgattcttttgtacttcttgttgatttaccaaatgattcgggtcacatttgatacgaagaatgaattttacgcgtatgtctcaactggggtcatcatgatgatcttattccatgttttcgaaaacattgggatgagcgttggtttattaccattgacagggattccattgccgttcatctcacaagggggctcgtcattattggggaacctaattggcgttgggtttatcatgtcgatgcggtaccattataagagttacatgttcagtgaagctgaagatactttctaggagtgaatgacggatgacgatgaataataatgattatttttggacagaggaaattgcagcatcgattagaagaattgggatcaccaaagccgcacaaaatgagtttgggttaatcaagtttgttgatgttccaatcgtggggcaaaaattgacggctaatgaaaccttagtggccattgaagctgagaagatggtacaagatcttgacagtccactagctggtgaattagtaaacgtcaacacaccgttagctgataatccggaattattaaatgcagataacgaaaaagatgcgtggattgctgacattcgggtcgattaggccattacttaaacaataatctgatttttttgaatagtcttgcttgacttttaattgaactttaattatgataggtactacttaatacaagcgatgaaaagatgagtaatttagtcagtagcattttaagagagtccggtcaggtgcaagcggataatgtgaaagctagatgaatatggtctttgagcaattcatttggtaaggtttaactgagccgaatgcgggggttgcccgatatagcgaacgagtatcaatcgggtactttgtaaggcgattactgtgaggtaatcgtaaattaaggtggtaacacgcatttagcgtcctttctctcatttatttgagaggaaggattttttttttggcattttttaaaagaagagggagcgattagtatgttgacattaaaacaagtgggtaaaacctttgagcgagaacaaaaaacattcgccgcactaacggatgtctcgttgaacattgaagcgggcaaaatctacgggattatcggttattccggcgctggtaagagtacgttgatccgactcttgaatggacttgaaaagccaacgactggggatgtgctcgttgagggccagtcaattgtggggttgagcgaacaagcaatgcggccgattcggcagaaaattggcatgattttccaacactttaacttactctggtcaaagacagtgttagaaaacatcatgttgccactaaaattagccggggtacctaaggcagaacgacaaatcaaagcccgcgcattattaaagattgttgaattgacccatttagaagcggcctatccaagcgaactatcgggcggtcagaaacaacgggtcgcaattgcacgagccttgattagtgacccgaagattctgttatgtgatgaagcgactagcgcccttgatccgaaaacaacgaattcaatcttaacgttactggctaagattaatcgtgaaatggggattacaatcgttcttgtcacccatgaaatggatgcggtgcggcggatttgccaacgaattgcggtcatggaaaatgggcggttaatcgaagaagggactgtgcacgaaatctttgaaaaaccacaaatggctgcaaccaaggcatttgttgctgaatccttagtggtgtcgccaagtgaaacggccgcttcgattgatcaactgttagaacgggttccaaatggcacaatcgtccaactgcgatttaacgaagaacaatcgagtcaaccggtgatcggtcgcttgatgcgtcaatacccagcagtcgaaatcagtgtcatcagtgggagtttacaacaaaccattaatggcgcacttggctatttatacattcaaattcaagctaatccaagtgatttaaaggcagtccttgcagaattagcacaacaaacaatcgaagttgaggtggtacgtcatggataacgtaaacggatttcaatcctattttcaatttaagcaagtgaactggccaagtatgtggcaagcaacttttgaaacagtttggttaacaattgtcagtgttttattggtggcagttcttggattcgcactcgggttagttctttatcaaacaaacgcgagtggtggtcgagtgaatcggctgttgaatggcattgtggctttattagtgaacgtctttcgttccattccattcatcattttaatcgtcttgttgattccattgacaaaaggcttgatgggcacgatgattggcccgaaagctgcgattccagcgttaatcatctcagccgcgcccttttatgcacgactcgttgaattagcttttcgggaagtcgatggcggtgtgcttgaagccacccgttcaatgggcgcttcaaaagtccaaatcgtctggcaagtccttttaccagaaagcatgccggcgcttgtttccggcttaaccgtcaccgcaatttcacttgttggttataccgcaatggcgggggtgattggtgccggtggactgggaaatcttgcttaccaagatgggttccaagctaaccaaaatgcgattacgttagtcgcaaccgtcattattttaatcatcgtcttcatttgtcaaaaaacgggcgacttggttgttcaacacattgatcatcgttaatttaaaaggaggagttttcatgaaaaaacacagtttaggattattagcagcagtcttcttattagcgggcgcacttgccgcttgtggtaacaaagaagcgaagtcagacagcaacacaatcgtcgttggggcatccgcaattccacacgccgcgattttgaaacacgttcaaccggagttgaaaaaagaaggcatcaacctcaaagtaaaagtcttcagcgattatgttttacccaataaagctttagcgagtggcgaattagatgcgaactactaccaacacaaaccctttttgaagaaggccaataaagataacggctacgacttagtcagtgttggcagtattcacttagaaccgctcggcttatacagtaaacaagttaaaaaattgagtgatgtgaaatcaggtgcgaaagtattagtttcaagcagccagccagactggggccgtgttttaacaattttaaaagacggtggcttaatcaccttgaaatcgggcgtaaatgctgaaaacgcaacgtttaaagacatcgctagcaatcccaaacacctcaagtttgagtacacattcgaaccaaaactcatgcctgaacttttgaagaatgatgaaggcaccttagtggcgattaactcgaactatgctgtgcaagccggtctcaaccctgaaaaggatgctgtggcccttgaaaagcaatcttcgccatttgccaacattgttgtgacaaataaaaaagaccgcaataacccagctatcaagaagctcgttaaagcgctcaaatcaaaatcaacgcaagaatggattaagaataaatggcacggcgcagtgttaccagttgaataatgatcaaagacaagtcattaagacttgtctttttttgctgttagcatgtgtaattcttaatttaattggaaaaagcgggttaaattggatatactatcattgaatataaacttttagggggagtaagaatgagtcgtccgtataatattggtttagatattggtactagttcaattgggtggtcagtggttgatgaccaaagtaagttggtcagtgtaagaggtaaatatggttatggggttcgtttatacgatgaaggacaaacagccgcagaacggcgcagctttagaacaacacgtcgccgattaaaacgacgtaaatggcggttaggattgttaagagaaatctttgaaccctatatcacgccggttgatgatactttttcttgcggcaaaaacaatcaaacctaagtccgaaggatcagcgaaagttacatccacagacaagtttatttaatgatcgaacagatcgggcattctatgacgattatccaacgatttaccatttaagatataggctaatgaccgagaaacgtcaatttgatattcgcgagatttatttagcgatgcatcatattgtgaagtatcgcgggcactttttaaatgaagcgcccgtctcatcctttaagagtagcgaaattaatttagtggctcattttgacagactaaacacgatttttgctgacttgttcagtgaatctggctttcaactagagacggataaattggcggaggtcaaagcgctcttattggataatcaacaaagtgctagcaatcggcaaagacaagcattatcactgatttatacgccaagtacgaataaggcagttgaaaagcagaataaggcgattgcgacagaattattaaaagcaatcttggggttaaaagcgaagtttaatgtgcttactgggatcgaagccgaagatgttaaagcatggacactcacttttaatgcagaaaactttgatgaagaaatggtcaagttagagagtagtcttgatgataatgcccatcaaattatcgaaagcctacaggaactttattctggtgttctattggcgggaatcgttcccgaaaatcaatcattgtcgcaagcgatgatcacgaagtatgacgatcatcaaaagcatttaaaaatgctaaaagcggtacgggaagcgttagcacctggagaccgacagagattaaagcaggcttatgaccaatatgttgatggtcaagaaaatacgaaggcctattcgaaggaagatttttacggagatatcacaaaagccttaaagaacaacccagatcatccgattgtgagtgaaattaaaaaattaattgaacttgatcaatttatgccaaaacaacggaccaaagataatggggcaattccgcatcaactacatcaacaggaattagaccggattattgagaaccaacaacaatactatccctggttagcggaacttaatcccaattctaaacggcaaacagtcgctaaatataaattggacgaattagtggcctttagagtaccatactatgtggggcccctgattacggctgagcagcaacgacaaagctccgatgcgaaatttgcgtggctgattcgtaaagcagaaggccggattacaccgtggaacttcgatgataaagtggaccgtcaagcatccgctaatgaattcattaagcgcatgacaacgactgatacttatttattggctgaagatgtactccctaaacagagcttaatttatcaacggtttgaagtgttgaatgaattaaacggacttaagattgatgaccaaccgattacgacggagttgaaacaagcaatatttacggatttatttatgcaaaaaataagtgtaacagtgaaaaatattcaggattacttggtatcagaaaagcgctatgcaagtcgtcccgcaattactggtctatccgatgagaacaaatttaatagtcgattaagcacgtatcatgacttaaagaagattgttggagatgcggttgatgatgttgataaacaagccgatttggaaaaatgtattgaatggtcaacgatttttgaagacggcaaaatatatagcgccaaattgaatgaaatcgattggttaacggatcagcaacgtgtgcaattagctgctaaacgctaccgcggttggggtcgtttgtcggctaaattattaacgcaaatcgtcaatgcgaatggacaacgaattatggacttactctgggatacaacggataacttcatgcggattgtgcactctgaagactttgataaattaattactgaagctaatcaaatgatgctagctgaaaatgatgtacaagatgttatcaatgatttatatacgtcaccacagaataaaaaagcgctccgccagattctgcttgttgtcaatgacattcaaaaggccatgaaaggccaggcgccagaacggatattgattgaatttgcgcgcgaagatgaagtgaatccacgactttcggtgcaacgtaagcgccaagttgaacaagtctatcaaaatatcagcaatgaattgctaaataatactgaaatcagaaatgaacttaaggatttatcgaattctgcattgagcaatacgcgcttattcttgtacttcatgcagggtggtcgggatatgtatacgggtgattcgttgaatattgatcgtttatcgacgtacgatattgatcatatcttgccacagtcgtttgtgaaggataattcgttagataaccgagttttagtttctcaaaaaatgaaccgtagcaaagcagatcaagtaccgaccgactttacaagcgttgaacttggtaagaagatgcagcttcagtgggaacaaatgttgcgtgctgggttaattactaagaagaaatacgataacttaacgttaaatcctgatcatatcagtaaatacgccatgaagggctttattaatcggcaattagtagaaacacgccaagtcattaagttagcgacaaatctattgatggaacaatatggtgaagacaatattgagttaattacggttaagagtgggttaacccatcaaatgcgaacagaattcgattttccgaagaatcgtaatctaaataaccatcatcatgcattcgatgcttatctgaccgcattcgttggtctgtatctattgaagcgctatcctaaattaaaaccttattttgtatacggtgagtatcagaaggcaagtcagcaagataagtggcgtaactttaattttttaaatggtctaaagaaagacgaattggttgatgaaaatactgaagcggttatttgggataaagaatccggtctagcttatttgaataaaatatatcagtttaagaagattctagtgactcgcgaagtgcatgaaaattcgggagcgctatttaatcaaacgctctatgcggctaaagatgataaagcaagtgggcagggcggcaagcaattgattcccgctaaacaagatcgaccaactgcactctatggtgggtactcagggaagaccgttgcctacatgtgtattgtacgcattaaaaataaaaagggtgatctctataaagtctgtggtgttgagacaagttggttagcgcaacttaaacaactgacggatgaagactcacaaaaggcattcttaaagcaaaaaattagtccgcaatttacaaaagtgaaaaaacaaaaaggaacgattgtgaaagtggtcgaagactttgaagtcattgcaccacatatcctaatcaatcaacgtttcttcgataatggtcaagaattgacattgggctctgcgacgtataaacacaacgagcaggaactgattctcgataaaacggctgttaaattattaaatggcgcgctacctttaacacagtctgaagaactcgctgaacaagtttatgatgaaatcttagatcaagtgatgcactattttccactgtatgatactaatcaattcagagctaaattatctgcgggtaaagcagcctttatgaagttaccgtggaagagtcaatgggatggtaataagatggtgcaggttgggcaacaagttatattggatagagttctaattggattgcatgcaaatgcggcagttatcgacttaggggtgttgaaaataagtacgccactaggtcaaatgcagcaaccatcagggatttctctttcacctgatacccaaattatctatcaatctccaaccggtttattcgaacgacgagtagctttaagggatttataaataaataaagctagcctgtcattagtgtaatgatgggctagctttttggtttgaaggcataaaaaaaggcctcataagaggctcagaatagaaaacttggtccgaagaccttgtttgattttaactcagagtatcaaatcaatgagtatttcgattgagtgtatcaagctcaacaacagcattatagcatgtcatcattttgaaaacaaggatgtagggggtaaatttttatgagttggcgaacagttgtgatttcacaacatgcaaaggtttcttattctggacggaagattattgtccagacaaaagatgcaacacaccaagtaccaattgatgatatccaaattttgttagttgcgactacccaggccgttttaacggcatcggcgattactgagttgagtgaagctggcgctaagattatttttacaggcaaagacggtaatccaacttgcgaaacaattgcggattatccaggaaatcgtagtctcgcgtcgatccagcaacaggttgaatggggaacggggttgaaagaaaccttatggacggcgattattcaagccaaaatagcgatgcaaattcaatgtgcacaattgttaggaaaggatattgaagacttaacaacagaagctgatgcaatggtatttgctgatcgaacaaatcgagaagccgtgattgcgcgcaagtattttcagttagtttttgataaagactttgttcgaacggagtacagtcccattaatgcagcccttaattatggttatagtttgttgttatcagccgttaatcgcgaaattgtttgtaatggctatttaacacagtttggcattcatcatcacaatggcgtcagtgattttaatttgggttccgatctaatggaaccttttcgaccagtgattgattattgggtggcacatcaaaagtttaatgaattaacccctgatgttaaatttggtttagtggagttactgaatcttgagctagaatataatggacagatcacaattcttagaaacgcactcactaaacacgtacagaattgtttgaaattcatgacaactccgaaagaagagtttgaagtaaaggtggtaatgactcacgaggtaccgaataatgcgcttattagtcatgtttgatttaccagttgaaacgagcgaggatcgcaaggcataccgtcattttagaaaagcgctgcttaacgaaggttttttaatgattcaatattctgtttatgttcgagtttgtgtcagcaaataatcggcgcagtttatcgagaaccgaattgctggctttactccgcctgcaggcttagtacaaacgttgatggttactgagcaacaatataataaaatgcatttcttagtgggcgaatcgagtgatgacgtccgtaattctgctgagaggacgttaattctatgaacattactttttatccataccacccctttagcgttcagaataagaaaataacggtttgcagtacaagtagtccagaagtgtataccaaactcattattggaatgtccggcgcacaagagaccgttaaatttagcaatgatcaatacgaattaatggattattcaaaggctgttatttggggtggggatgtggcagcaattaatttgaatcatctatttcaaaatcggttgattaaaaaattcgccgccgacttaacggatcagcagcgccagaaattaactcagttagatagtgagattcgttcaacgattttggatgcggcctttatgtatgaattgaccttagatgtcaatcaggaatgggatcttcaaagaatgattaagttctataatttacaattttcgactgtcgtccaacatgacccatatggtataattgagagtatagtacagacagcagtagagttaaatgaatcaaaaataatcacgttgatcaatgtttcgcactatctcagtatcaaccaatttaatgaattggtgaggttggtggcgacattgaatgtgaaactctttctcattgaattttcagaagaggttaaatctgatcagtaccagaaatgttgttattatcacatcgataatgattatgtcgaatggcgctatgaataaaatgaaattctgatgaaaaaacaacggttttagaagagtatcaaatcaatgagtagttcaacaaaattggaaataagtgggttgtaacatctgttttagaagagtatcaaatcaatgagtagttcaaccggttaaggagattcttaaacgttacccaggttttagaagagtatcaaatcaatgagtagttcaacctgtaattaattggaaagatagcggagacagttttagaagagtatcaaatcaatgagtagttcaacattatcccaatggacatgatgctttgcctcgttttagaagagtatcaaatcaatgagtagttcaacagccaaaagccacatggtattataaatatagttttagaagagtatcaaatcaatgagtagttcaacaccagcaagcgtttaaacttaaaaaggtgggttttagaagagtatcaaatcaatgagtagttcaacctatgatattgacgacgccaaagcaacagcgttttagaagagtatcaaatcaatgagtagttcaacaaataatggacatggttaaaattacaaacagttttagaagagtatcaaatcaatgagtagttcaacaaggattcattttcaatctaacacatggttgttttagaagagtatcaaatcaatgagtagttcaacaaataacgggttgttttgattgacgctcaagttttagaagagtatcaaatcaatgagtagttcaacatactcctttaaactccaatgccaattaatgttttagaagagtatcaaatcaatgagtagttcaaccggtattgtggctgaccaaatggctcaacggttttagaagagtatcaaatcaatgagtaatattaacctatttcccgtgcgaatctattgaaaaagatcacgttgtccgcgtggtcttttttcatgcattcaagcattgaaaacagttctcaattagcatagaattaagagcgtataataattgctagaatgcgattcttggagggtcatctatgtctaaattagagattatcgatttgcacgtcggcatcgacggtaaggaaattttaaaaggtgttaacctggaaatgaacacgggtgaaattcacgcgatcatgggacctaacgggactgggaagtcgacgctttcggaaacgattatgggcaatcccaagtatgaggtactacaaggtcagatcaaactagatggccaaaatattttagaaatgccggttgatgaacgcgcccgtgcggggttatttttggcgatgcaatatcctgctgaaattcaaggggtaacgaacgctgaattcatgcgtgcggcgattaatgcacgtcgggctgaagatgatcagatttcagtgatggctttcttgaaaaaattagatcaacggatggcattcttggatatgacggaagaaatgtcagaacgttacttaaacgaaggattttctgggggtgaaaagaaacggaatgaaattctgcaattgatgatgattgaacccaaattcgccatcctagacgaaattgattccggacttgatattgatgccttgcaagtcgtttcaaaaggtgtgaacgaaatgcgcggggctgattttggctcattaatcatcacacattatcaacggctcttaaactacatcgtgccagattatgtgcacatcatgatgggtggcaaaatcgtcacgactggtgatgcgtcacttgcaaaacgtttggaagacgaaggttatgtcgggattcgtgacgaattaggcttggatatcaaactgactgacgacgaaagtaaatagggggcgattctgatgaagaaaacattagccatcacgcctgaacaaatcgcgtcattctcacaattgcatcaagaaccggcctggtttgctgaaatgcgtcaagcagcgtttgcgcaaattgagcaactcgaactgcctatctttgaaaaaattaactataaacattggccagtgatggcagcaaatgcgccaacagccgttaaatccgatttgagtttaatgccatctgcggcagcgaatctttcagctgatcaaccgtacgcagtacagattggtcagacaactgccaagttaaatttaccggcagaattggcagaacaaggtgtcatttttaccgacattttcaccgcgttacaagaacatcctgatttggtacaacaatactacatgcaagtcacagtgaaaccgaacgaggatcgcttaacggcttttcacacagctttgatgaacagtgggctcttcttgtatgtgccgaaaaatgtggtgattaagcaacccattacggcttattatgtacaggacagcactcaacccgctgattttattcatcacgtcctcgtagtagccgaacaaaacagtgaatttagttatcttgaaaatctccaaacagcgggtgaccacaagaacttagcaaatgttgtcgtggaagtgattgctaaagataacagtcacgttcatttttcagcggttgatgcctttggaaaatccgtgacgacttacttgaatcgccggggccacttgatgcgcgatgcgcggattgattgggcattgggatcaatgaatgatggcaatatcatcggtgactttgattctgatttagtgggtgctggatcacatgctgaaacgaaagtggtcgccatctcaactggtaaacagattcaagggattgatacgcgtgtgacgaatattggaccgcgttcaattgggcacatcttgcaacatggcgtcattttagaagatgcgacgctaacgtttaacgggatcgggcatattttaaaaggggctaagggtgccgatgcccaacaagaaaatcgcgtcttgatgttatcgcggacagcacgcggggatgcgaacccactcttattaattgatgaaaatgacgtgcaagctggccatgctgccagtgtcgggcgcgttgatgaacaacaaatgtattatttaatgagtcgcggtctttcaaaagaagtcgcgcaacgacttgtaattcgtggtttcttaggcgctgttctaagtgaaattccggataaaaacgtgcgccaacaattaacggacacgattgaaaggaagttaatcgatggtcaaccagttaaatgattatcggtgcgactttccgattttagaccaaatcgtcaatgatgaaccacttgtttatttagacaatgcggcgaccacccaaaaaccacaagccgtgattgaccggttggtggcttattaccaaaatgacaatgcgaacgtgcatcgtggtgtgcatactttagctgaacgagcaaccgcccagtatgaagccgcgcgcacgaaggtccaaaccttcatccatgccgctgcgagtgccgaagtgattttcacaaaagggacgacgcaaagtttgaactgggttgcaggcagtttcggtccaaccgtggttgaagccggcgatgaaatcgtgattagtgtgatggaacatcatagtaatctcgtgccgtggcaacaactggcgcagaaaacgggcgcgaaattgcgttacatcgacttattaccggatgggcaactcgatttagagtcagcacgccaggtgattgggcctaagacgaaaattgttagtttggcgcatgcttccaacgtacttggggttgtcaatccgattaaaacaattgcggctttagtccatgcacaaggcggttacatggtggtcgatggggcacaagccgtgccgcacatgatggttgatgtgcaggcacttgatgcggacttttacgccttttcagggcataagatgcttggaccaaccggcattggtgtgctttatggcaagcaagcattacttgaacagatgccacccgtggaatacggcggcgagatgatcgactttgtgggcttacaatcttcaacgtttaaagaattaccgtggcgtcttgaaggtggaacgccaaacattgcgggggcaattggcttaggggccgccattgattatttaacgcaaattgggatggatcatatccaagcccatgaacaagcgctagtcacaatggctttaccgcagctccaagcaatcgacggcctcacgatttatggcccacaagatgccgcccaacgcaccggtgtgattgcctttaatctcgacaatttacatccacatgatttagcgaccgctctcgatatggaaggcgttgccgtacgtgctggtcatcactgcgcacaaccgttgatgcaatggttgaacgttgccgcaaccgcgcgcgctagtttttacctctacaataccgaagcggacgtgaaaacgttcgtgaccgccattcaagcagcaaaggagtttttccaaaatggcactctctaaattagataacttatatcggcaggtcattcttgaccattcgcaacatccgcatcatcatggtcacttgacgactgccgatcatgaaattgaattacgcaaccccacctgtggcgatgtgttacaacttgaactggtgctcgaagacgggcagattagtcagattgctttttcaggggaaggctgtacgattagccaggcttctgccagcatgatgaccgatgccgtgatgcataagacaccggcgcaagcggaggcgatgatcgaacgcttttcggatatgatgattggtgatcgtgacgaagactggtcattgttagaagatgccgcgattttacaaggggtgcaacaattccctgcgcggattaaatgcgcgactttagcttggaaggcgctccacaaagccttaaatagcgatgaccgacgtgcaacaaccggtcaaatgatgaaccacgcagaaacggaggaaactaacgaatgacagaagagacaacgatgccccaatttgaagagtacgactacggctttagcgacgatgtagagcccgtcttttcaactgggcgcggtttaacggaagacgttgtgcgcgccatctcgcgtgagaaaaaggaaccacaatggatgttagatttccgcttaaaatcatttcacgcttatgaaaaaatgccaatgccagatttcggaccggacttatccgatcttgatttagaacacatgttgtattatcaaaaggcaacggacaagcaataccgcgattgggaagatgttcccgacaaaatcaaagaaacgtttgatcgcttaggtgtgcctgaagccgaacgtaagtatttagcaggttccagtgcgcaatatgaatcagaagtggtttatcacaacatgcgtgaagaattcgaaaaacttgggatcatttttaccgatatggataccggtttacgcgaataccctgaaattgtgaaggaatacttcagtacgttggtcaaaccaactgataataaattctcagcgcttaactcggccgtttggtcaggtggcacgttcatctacgttccaaaaggcgtgcggacggatattccaatccaatcgtacttccggattaacgccgaaaattcaggtcaattcgaacggacattgattattgtcgatgaaggcgccagcgtgaactacgttgaaggctgtactgcaccaagctattcaagtgatagcttgcacgcagcggtcgttgaagtctttgtgaaacgggatggctattgccgttatacgaccattcaaaactggtcaaagaacgtttatagcttggaaactaaacgggcccaagccatggaaaatgcgacaatggaatgggtcgacgggaatctcggttcgaagatgaccatgaaatacccaagtgtctacctcgatggtgaaggtgcccgcggaaccatgctctcaatcgccgtcgccggcgaaggcgttgatcaagacagtggcgcgcggatgattcacgctgcaccgaatacgtcatcctcaatcgtttcaaaatcgattgccaaagatggcggggccgttgattaccgcgggactgttcgttttgaacgcgacagtgacggttcgtttgcccatgtcgaatgcgatacgattattatggatgaccgctccagctctgatacgattccgtacaacacaattctaaacggcaacgtctcaatggaacatgaagccaaagtctctaaaatttctgaagaacaactctattatctgatgagccgtggcatctcggaagccaaagcaaccgaaatgatcatcatgggcttcgtcgaaccattcaccaaggaactcccaatggaatacgcggtggaattgaatcgattgattagttatgaaatggaaggcagtgtggggtaattgaattgcataagctagaaatgcttatttgaaggcgtttctggctttttttgtttgtgcatgtagaaagtaacaccaaaagtaacaccatttggatagaaatttttagagagatttaactagtatgcagtattaaatggtatgataaaataaaaattataggagatatggattgaagtcaatatttgagacagattttaagagacattcagaaccgcgtttaccttccacagctcaaataaatcattaatcgcgattaataacttatttgaaccctggaaagcattaaatcaggcggccatttggctcgtaagtgttgcaatttcaacttgtaagggggtctggtagcccagtgaactatgaattctcttcctattgtagaaagcatgcacatattcaaaaaggacggcagcggcagtttcataatggatgtaagccaagccgtaaacgcccaccaagtgaacatcaatcaattttgtgccacgtatcttaatcgactagcggccggattggcccaagcggacgaggcgattgttgctcattactgcaactggtcggcgattattggccgacgtctgcaaaatgggcttgtcattacacagcttctagcggatggtacgttaattttgagcgatgactcgcaagtggcagtcggccaaaagattgattttaaggaggagctgatttaaatgacactatcggttgccagaaaagttagcttagtcgaaatgtgcttggcgttattaatggttagcgctcaagtcagtctaccgatttcgctggttccagtaacactccaaacgctcgcagtcggtgtaattggcaccacgttaccatggcgcttaagtcgactggtcatcgggagctatctcatgttaggcatgcttggcttaccggtctttgcaaattatgccagtgggactgcagtgctggtcggaccaacaggcggctacctgataggctttatcgcttatgtggcaattgttcactatagtcagcaactatttggacaatcgaaccgcgtacttctcggcggcaatgtgctagcaagcattattcaactcggatttggcacactctggctaatctggtcattaaaattatccgtagtgaccggcttaatgaccggttttgtgccgtattttccgattgaaatgatcaagagttgcttagtggtgatgattgccagtcgcgttcaaccaattagttaaaaaaacactatccaatcggatagtgttttttagtttaacgctttaattttagcgattaacgcgttatttttaaggtatttggcaaaaactaacgcggtttcgcgatcttctgcatagtctcgaccgctttgttggcgcgcccgagcacggaggtaatacaaatgatcgacttgtttgatgatttgatttttttgactcagtttgagggctttcgtcaaaaactcgatagctgcatcaatgcggtgttggttaatcatataggctgctgtgtgacgcgaagcaaataggacgcgttgaacatcaatgacattgatgtgatcaagttggttgatgaaattgatattattattgaaataaaaatcagctaattcctcgccagcttcttggtaaattaaacccataccggtatttagaagtaacttcaacgttgaagtgtcgtcaccgatggccgctgtgaacgagttataagcggaaaaaatctgtaattcagattgatggtcaaggtaacttaaatagccattgaaaaagaagaagatggcgggataaggatgttcggttgccttgaagtcgatatcggtaattaatgcggcagcagggccagaatcgcctgctaataaagcaacttccgcagaaatcacgccttcgtcactggcagtgtcgagcgcgttaaattcggtgaaaagttcatttaatgtcaatccaagccgtgtacaaatcttaattagaattgggattgtggggggcagatttttcttttcaattttgctgattgtattttgcgtgcaaatccccgctgctaattcagactgtgtcagttgcttgttgagtcgctgttgatggatcaattggcctaaaaacatttttagcctccaaatagtaattatttatctatatttatgattaattatatacgtttaatgcagacaagtatacgtttatgacatttaatccttttaaaaaaattacgtgataaaatcgaaatgagtcaccaatcatgggtattcataatatgaaaggaggggtatgataatgatgagtaacattcaaaatttaattttctggttttggaattaaggttcgagtagggagttttatgcatggcaatgaaaatgccgctggcaatgcagattgtcattaatctaagtacgtttagttcgtttctactattagtattatttttgacggggaagttgaaacgaacgaacagatttcaactactattatcagttggagtcggcattgcttttgttcagggaatggatttattaattggaaattttcttgaagagctatggctgattttggcaactgttggattatatggttggttaaatggctttaaaaatctgcgtaaattaaagacaagttatgcgttaattatcgcaaccatctttagttacatcatcgtgatgctatcatcggttctgacaacggtggggttaattgggtatactcacttaaagggccttgataatctgatgagtagccagtttaattggcaaatggtgtgtttaattatgttgagtcaattattgattgcagccggattaggattaattgtccaacggttagatcagcttattaaagtatccattgcttcatacggtatgtgcgtggccggcacgattttagccggtctcgcgttatttgtggtggcagtgatggtgctttttgatagctttaagcatgcgaatctgccggttgaatatttgtaccttgtgttaggacttgtgctattactattagttttggtgattgtgggaatgcttttgtatacgaaagctgtgattcgccaaaatagaatcaacgtagaacaagaaagtcagcgaaatctaacgctgtatgttgaacagttagagcgtaactaccgtgaaatacgcaagtttcgccacgatatcgccaatgctttattggctttagagacaattatcaatgaacaagggagcccagttttaatgcaggattttcatgatttactaacgcattataactttgacacgattcaagatcaggcaattggacggtttcaagagattaataatgcttatattaaaggcattatttttagcaagtatattgaagcacataataatcggattccctttaatttagaggttcaaccggatttatttaagcaacaacagtattttgatgaattacggattctgggaatctttttggataatgcaattgacgtggtaaatgatattaaagatggttcaatcagtgtcagtttattcgagcaaaagggtaagatggtctattgtgtcaaaaatacgattaatacaccagtagaatttggtcagctttatcaggctggttattcaacgaaggggattaatcgcgggcttgggctcacaactgctaaagaaatcacggatatgcgctcagattttagcttaatgttaaaacaagatggagactatttcgttgcaatgcttgttgttgaacaggaggagacccatggttgatatttttttatgtgatgataaacaggttttactagatagttatgaagagattataacggcatatattcaacaaaatatattggatgctcaggtgcgtttgaagactaagaatggctatgacctattaatttttttacaagaaagtcaaacgcaagggggcgtttactttcttgatattgatttagagaatgacgtgctggatgggatggaattggcgcttaaaattcgtgaattggatccatatgcacagattgtgttcgtttcaacacatgacgaacttttaatggaaaccattcaacgccgaattaatgttttgaattttattttgaaggatcgcgggttagcacaggttcgtgcagatattcaagcaaccattaacgatgccattaagttacgacaacaacaggtgccattagctgaagaaccagctcattttgaatatgatgatggattatcgtttgaaaaagtggcaattcaagagattaattatttcgaaacagcgtataaagcacggcacgtcttcttacacagtgatcatcggttaagtgaatttgtagggaaaatcgtgacgattcaagcgcaattgccacaatttttcagagcccataagagtatcctagtgaatccggacaaagtcgtacggattgataaggagacgcatcaagtgatatttacaaatggcgatacatgtgatgtttcgtaccgtcgaattgaggcattacttaaattgatacaagcagacaagtgttaaaaattaagcaacgccaaaaattcgctttcaaacgtggtacactaaaattgataatggatgacagttttaggaggctacggattgaaactatatacaaagaccggtgacaagggattaaccagaattatcggcggtcaaaaagtgcgcaaaaacgcaattcgtgtggaagcatacgggggtgttgatgagttaaattcatacttaggtgtcgtcatcagtgatttacctgattatccggcattgagaatggaattggttgagattcaacaaattctgtttgactgtgggacagatttagcgacgccggatgattcgcgggggtatcggacagacaacgcatacacgaaatggttagaagctaagattgatcagtatgcagatgttccacctgctttaaaagaatttattttacctgggggagtaccatcagcagcgaaactacaatattgtcggacaattgcgcggcgtgttgaacgccaagtcgtcgccttgcaggaagtagaaccgattaacgaagctgtattaactttcttgaatcggctctctgattatttgtacgcgattgcgcggtacgtcaatcatgaagagggcgaaccagagacagtttatcgaagaaataaaacaatttttcattaaaaaaaccgccgatgtgcggtttttttaatgtcgaaattaagggatgttttgaattgctaacgcagcaagcttccactataatagcttgaaaagaggaagtgattgtgatgtttaaatcaaaagaagctaaagtcgaggcttacgaaatgctcttaaaacaacaagctgctttgctggcaggtgaaacgaatttaattgctaatctagcaaattcttcggcgttattaaatcaaatattaccggagactgtttttgcgggttattatctgtatcaagatgctgagctgattttaggcccatttcaaggaaacgtctcgtgtatgcacattgcactaggtaaaggggtgtgtggtgaagccgccgcaaagcaaacaacgttaattgtagaagacacggcgcaacatcagaattatatcgcttgtgattcggctgcacgttctgagattgttgtgccaatgatcaaggctaatcaactaatcggtgttttggatcttgataaccgcgtcgttggcgcttacgatgaggtcgaccgagattatctagaacagtatgtcacgttactgatgcaaaactaaaaaaagcaaatgcgtttctaattgatgttagaagcacacttgcttttttttaattgattagagtgtcttgattttttgtttgaggtggacgcaaacctgtgtcaccacaatgattgccaagagccggtccagataatccgtaccggcttgaaccagtgtaatgctgacaaactgatttagtcccaagccgcttagtagttgtacaattaaacttgaccctgaagaggtgataccgtggaacaagaagtaagtgattaatgaactgacaattgtgccgggaatggcgacacctaaagcaacaaggggtaactcgcgtttcgtccgttggtggtggtataagaaccatccagcgagtaagccggttaatagaccgtctggcaagtaataaagcgcaaataagtcggtcgtgacaccgctgatgatgctactgcaagtggcagttaatgcgcctgccagaggacctaatagggtgctggctaaaatggtgccgacgctatcgagatagattggtaaccgtaaaaatagggcaatgttagcgcctacgtaattgagtgcaatggcaagtgccagaatggttaagtgttgtgttttaaattttcgcataataggttccttatctaagttttggtaagtccgttttaatgagggttgcttgtgcatttaaaacgacggtcaaaaactgttcaaagaaacgattggtgtccaccttagttaagatgaggctattggcaggacggtgccagaaatcgaaccggtcaaccagtgtttggccaatgctgatgccggttgtttcgacggtggtataactttcaaagccgtgacaaagggttggatcgataaaataggcgactgctaatggatcattgatcacacagccgataatgtgttcatattgccaatgaaaatcaaaataaaactgggtgatggcttttagatagtcgccgacttcaggattgacacgctgacaataagccagcaatgttggcgtgaagacaatttcgcgggtcacgtctaagccaaccatttcaatcttttgatcgagttggtcgaataccaacagtgcggcatccggatcgctccagtagttgaattcagcaacgggtgagcagttaccgtgactcttataggtcccacccattgaaacaaagcgggcacagtgccgacctaaatctggatttcgctggagcgcagtcgcaatattggtcaatggtccgagtgcgataatactgatatcgctcggttgactaaaagtggctgctaaaaaatcagcggcggattgttgtgccggttgaatagtggataggcgcgggatatggctgtcacctaaaccatccatgccatgcgtatcctgcgcactgacaaatggtttatggagcggtttatccgcaccaacataaacgggaatgtcgagctgcccgaggcgttcaagacacttaaaggcattgtccacgccgatttggacgggaacgttgccgcaaacaatggtgattgcaacgacttccaccgctggcgattgaatggccaaattcaaagcgagcgtgtcatcgatgcctggatcgcaatcgataatgattttgcgagtttgcatttatttctaacctccttgagatccttagttttttattctgggaagtttccgaaccagtccaagtagttttacttgattttaaatgcacccctttatgataccgagttggtgggcgggtgtaaatagcagttatttttaaaaaacaggcttgacagtgattagcgaacttgatattataataaacgttgtaagatttgatatggagaattacccaagtctggctgaagggaacggtcttgaaaaccgtcaggtgggttctgcccacgcgagagttcgaatctctcattctccttaaagtaaaaagcggttcgcggatgcgagtcgctttttttgttgggtaaaataaaaaaccagagtgcatgcgcactctggtcgattcggtttaaaattagtttgtgtaggtttggaaacgacttgcatcggtattgtagtctttagcatcggctggattttcgattgaaccaaatggcatttgcgcacgaagtttccagtttgatggaatgttccattttgcagtaacggcttcatcaattactgggttataatgttgcaagctagcgcccacatttttttctgcgagggctaaccaagtggcatattgtgccatgcctgaagcttgttctgaccatgttgggaagttttcggcatataatggcacgttttcttgaagattcttaacaacgtcttgatcttcaaagaacaagattgtcccgacaccagcggcgaatgaagccaatttagcttgtgtacttgggaagttttccgcaggtgttaatggttttaaggcagttgctgtaatatcgttccaaagtgtttcatttgcttctccaaagagaataatggcgcgtgaaccttgggcgttaaaagcagttggtgtttctttaatggtgttgaagattaattctgataattcagcttcgctcattgaaacgtttttgccaagtgcataaattgtccggcgtgtttgttgtaaatcgaataattctgtcatgttcattactcccttgtgaaatcgtttttatcagtgcatgcgaataatatagcatacttattaaatgtaagcaatgaaaaaagcgaaatccctcgtttgtatttcgcaattaacagcatttagttcgattgtattttacaattatagactagactgcagtttaacgggcaattcagattttgaaacgacagtccaagaattgacgaagcgccccttggcatctaattttaagtagtgattaggttttagtgcgcgcggcgcttggaaaacgacttcgtaatgactgccatcagcacggtaagcaggttgccggtaaaggtaatcgccatgtgcttgttgtgtcccgtattggtgtgctgttttaacatagacggcttctctgggaattaagaggttgaaccggtcccactgttgggcaaggtcattgccgtccgtcatattctgagttgtggctgatccgataattggaccgccgataacaattagtccaagtgagaacagtaatagaatgatttttttcatgattgacactccttgtgaattgatgtcttaatcgtatcaagctagaagttacattgattcagtctaaaggtggaatttattctaagcgaggtgacgattttgtcatatcgtgggcctgtttaaggattgatagtttatgtctgtggccgaatgcattataatagttagttatgagatgttttcagtagagagtgggtgatgattgatgaaggaagttcaaaatgtgatgcaacagttagacgcgattcgtagtgcattgattaaaggggacatctatcaatcaattccggaaaaagtattggtcgtcatggatggcgtccaatataagacgcggcggacacatgtcgtagtacctgaggacaacgagtcagtcttgcaacgaatcacagcaattgatgagcgaattaaaaccaaaggcaaagaagcgaccatcagcgatgaagagctcgatgatttattaaggcatcttgcaagcccagattcgcaagtgcgcgataaaggtgttttttacttattcaatcgattattacggcagacggttttaaccccagcccaattgatttgggtcaagggccgcttattgcaagatgattatttattcgcgcatattttagaacctgaaaatgacgctgtttttttacgttcgtttagcgcgatgtttttggccgggattttatatgctaaccgcactttttatcatgtattaagtacggccgaattattggcaattgaacggcgagtaatggcttatacagtcatcgaattagattcacgaggatacgttgatggtaaaggctgggcgcatgcgatgacgcatatcatcaatgtctggtcagaacttaacgaaacacctgaaatccaacgtgcggataagattttgatgatggcaattgtgctacaggcgtatcgcttctctgataacgcactcgcatatggtgaagatagtcatctgacgaacgttctaatcagtttaatgaacaagcatcaactctatgtcgattattgtttaatcgtcttacaggagtggcagcgttcattgttgactatggcaccacaggagaccgttggtttttggaatcggtggtataaccgcaatcgctttttacagtcattgttgctacaacctgaattacctgataaaattgcggattacttacggaagatttcagatttattttaattaaccagataggattgagagaagatgacagtaaaagggattatttttgacgtcgatggcgttttagtggatagtgaaccgtactattttgaacaacgcttagcatttttgaatgcaattggcgcacgactaacggcagaggaaagtcgtaaacaaattggttccaatatgaatgccgttttaaaacagttgtttccaaaccatactgttttggaacgagcggcaattaaaaacggctatacgtcgtataaagcggctcatccaatcgtttttaaaaatatcatgaacccagacgcgcaaccgttattagcaaccgttgcaccgacatatcaaatcggtttggcgtccgctggtgagcgcggaattattcaacaaatgttgttggaaaccgcgttagaaccttattttgaaacggttgttagtggtgcagagattgcgcataataaaccagcaccagatgtgtatctagaagcgcttaaaagaatgcatttagaaccaaccgaggcggttgcgattgaagactctgcactggggattcaagcggggaaggcggctggtttaaccgtcatcgcattaaaaccatttgatccacttttcgcgattgatcaatcggcagcggattatcaaattgaatcattaaaagaagttccggcaatattagcaacgttataaaaaacggcttccgctgcaggaagccgtttttttgtcgtactatcgaacagcaccttaacaattaattaaagataaatgtttggtaatgtttagtatgtagtgtaaaatacttattggataaaaaaataagtaatgccacataactagttcatagtgtataataaacgcaactagtagcgtcattgctaattgatgtaaattacttaattgggttatattttccggaaattaattttaaattaaataatgatgtaattggagtatttaaaatgagaatattaggggataaactaaaacaaatccgtaaagcacgggggatgtctcaagcggagttagctaaggggatttgtacgcaagcaacaattagcttaattgagaaaaaagaacaggtgccaagcacaaagattctcttggaaatttgtaagcggcttgaaattacgttggactcagtgattgtgcaagaagatgatcaattacacgtcttgttgagtcgtgtgcaagcattgttatttaccaatgaattcaaaaaagcacgtgatttgattcagcagatctacacagatcaactggtcaaagcagatgattacaaacggtattattatttccaaggtcaaattaagttattgctggagaataaaccggacgatgcacttttctttttcaatcgtgccttcaatcaatacgttgtttctcagacggatgtttacggtattctatgtattatcggcattagcaagtcctatttgatgaagggcgctttagagcgtgtacggatttatgcagaacaagccgttgaaatgttggagaattctgatccacttgctatggccgatttccaagttgagttgcagatttataatcacttagcgggaattctttttgaattgaaggattatgaaggtgcgattaagtacgctcagcttgcgattgacgaagcaatcgataagcaaagtctttacttacttgatgcattgtatttcattcttggtcgtgcagaacatgcgcttcatcgagagaacgccttacaggatttaacggttgctaaaacattggcgttaatccggcatcatccagagattattgtgcaagttgatcaacaattggctgaataagtggttaaccactaaaaaaagccgggacataagcgtcccggctttttgattgctaatttatgcttcttcgtgaccaatgctactgcgtttcttgttgagtgcgtgtttattatctaaatctgtccgcacaacgagcacgtcgcaaacggcggtccgagtaacgtattccgttacagaaccaatcaagagacgttcaacagcgtttaaaccagttgcaccaatcatgatgagatcgatatttttcttttcgggtacttcgcgggcaattaaactctttggtgcgccatattcaatgctatagtcaacatcttttaagccaagttcattggcagtcacgatgtattcgtccattgttttcttagctgtttctgtgacttgttcaaccattgcggaatcaaaactagagatattttggaaggcgcgggtatcgataacgtgaatcaagtggagttgtccgttattccgaagggcaacttcaactgctttacggaaagcgagttcagcttcataagaaccatcgattgcgaccaaaatgtgcttgtattgttgtaacattgtcatcacctcatttaattttacatctttattgtacgctagttcagtgccaaaagtaaatcttaaaggttagttgcaaagctaaggccgattaagccggcgattaaactggcagcaacgagcgtcaccaatgtccagactagtggcaatagccagtaaatcaaagccccgcagatcgctacaccgatgagtgcaatccctgaaaagtacatcaatcgacctaaatgccggttttcagttaaatcaaagagtaggaacttcttgtcttggtagtaacataaaatcgcaccaagtagggcgataatgattaaaaaaacgattatggcgatttgaatcaatgtgcaacctcctaaaataatcaacaaaaaagggccaacgtaaacgttagcccggtcaaagtcgttggactttgggaaatctagtggtgccgtagatgcttcccgatagttgagcccgctagaaaatgcaggtgggtcagattattattagacttggttccttcgcgaaaaagtctacactcgctaataactcatccgtcccattaacgaattacttgatcggtcaacataaggtgggaagacgcgcacaccttagaaatcctactattataatagcacgctcgtgatgttaacacaacacttttgtaaccgttcacttatgcggactggcttggcgcaagcgttctagctgttgtttgaggacttgctcgtatttaccagttgcttttgcttcgtaataatgactacctaagagcttatctggtaggtaatcttgcgcgacccagtcgttgggataattatgaggatatttgtagtcgacaccgtggccaagtttttcagcccctgcataatgggcatcacggagatgatcggggacttcaccggctttgccagcgcgaatatcagctaacgcgttatcaattgcggtgatggccgaatttgattttggagataagcagagatcaatcactgctacggccagtggaatccgggcttcgggaaaaccaagttgtttagccgcagcaattgcctcgactgtacgggcacaggcttgagggttggcgaggccgatatcttcgtaggccattgtcatcaagcgccgactaatcgacattaaatcaccggcttcaatcaaacggcccatataatggagcgcagcatcaacgtcactgccacggactgatttttgaaaggcggagatgacatcgtaatgggcatcgccatctttatcatgagtaatggcttttttctgcacgcattcttcaataacgtcaatatcgatgtcgatgacgttggtgtctggattcgctggtgttgaacgagcagcgagttcgagggcgtttaaagcactccgtaaatcaccgtttgtgacgcgggcaaggtattgttcagccgtttcatcgagattgatggctagtgcacctaagcctttttctttatctgtcagtgcccgttgaatggcgacatgaatgtcggcttcagtgaggggcttgacttcaaaaatttgggcccgactccgaatggcagggttgatactgatatatggattttcggtagttgcaccaattaagataatgcggccactttctagatgtggtaagagaaaatcctgtttggttttatccaagcggtgaatttcatcgaggagtaaaatcacggtgccactcattttggcttcttcagcgacaatctgtaaatcttttttactatcagtggcagcattcagcatgcgaaaagcgtactgggtactaccggcgatggcactagcgatactcgttttaccagtaccaggcggtccgtagagaatcattgatgagaggagtttggcatcaaccattcggcgaatgattttttgcggccccactaagtgcgtctgaccgacaacttcatcgatgttagtcggacgcatgcgaaatgcgagaggttgttgcatagcgttcatcctttaatgtttaggttgttcctagtataacatgtcgcgcaaattcgtagtgattatcgttttaaaaggttttagggatgtgtataatgagttgtataagactgaattaagaagaggtttcaaaatgcctaatcaattatttgagaacattaaacaattacgcttaacacctttattgaaccaaggtgcttttggggtcgaaaaagaggggcagcgagtgaccggattgggcgcattgagtcaacaaccgcaccccagtgagttaggatcgcgaacgtttcatccatacattgcgactgattttgcagagatgcaaacggaactggttacggataccttcgaacagaccgtagatgtccaacaacaattattagcgctcgaacaagtattgcaatcaagtatggccgattcggaatatatttggcccctcagcatgccaccgttgttaccagacgatgaattaaccattccaatttcagaatacacaccggcggtaaaagcctatcgtgactatttgacgaagcgctacggtcgacgtctacagatggtctctggcatccattataattttagcctgtcatcgacgttaattgtgcgtttatttgatgaatactatcatgatcactatgtgagtctaaaagattttagcgatgcgttgtacatccagattgcgcaaaattacgtgcgttatcactatgttttaacgtatttatttggtgcgagtccgatagcggaaccaggctttttagaagatatgacgaaattaccagaacaccctgtacggagtttacgctcgagtgaattattcggctacagcaataagcaattattaattcattttgattcagttgccgcatatgttgattcaatgcgccaagcgattgctaatggcgacttaatttcggaacgcgaattttacggaactgtgcggttacggagtcactcattggatcagatgttagagactggtgtggattatttagaatttcgggggtttgatattaacccgtatactgcgacggggattgatcaacaacagctagacttcttacacttattctttatgtacttattatccttgccgaaattatccggtgatttagccactcagattcagacgggtcgtcagttaaatgacacagtagcattagagaatccgctgcagccatcgcagctccaaacacaattgaaaactgtgatggccgatttggcccaattcattacggattatcatctgaatgagcgttttaaacaagcttggacagtgatgaatgagcgtgttcaggaccatcgacaaaccttgagttatcgcttaacacaagcgattgaagaggactcgctaaaggcatttgccctcaaacaggcaaaacgttttaaatgtgagctgacagagactccctatcagttacagggatacacggatatggaattatcaacacaaatgctgatgtttgacgctttccaaaaagggctgcatgtggctgttttggatcgcgatgaacaatttattgagctgacctatcaacatcatcatgaattagtcaaaaatgggaatataacgagtttagatcggctaattagtgggccgttagtggataataaggtagtgactaaaattttattggcaagtcatggtatgcgggtgccagcgggtgccgaatataccgctttagagacggcagtagcagattatcaagcggcgtttggtcagcgcgcgattgtcattaaaccaaaacacagtaacatgggggcgggcattaccacatttttaacgcgtccaagtgaagcggacttcattgctgcttttaaactggcacaaacgtatgatcagcaaattttagttgaagaattcattgcgggttcggaataccgtttcttagtgatgaatcataaggtccaggctgttttagaacggattccagccaatgtcgtgggggatggtcgttcaacaatcgcccaacttgttgctaagaaaaacgacaacccattacgtggcgaagcgcacctgacaccgttgcaaaacattcgcctcggtgaacgggaattgctcatgttgaaacaacaaggttaccgccctgaagatgtgccattgcgtggttcacaggtcttcttactacaaaattccaacgtctcaaatggtggtgattcggttgacgtgaccgatgagatggatcaaagttactttgcgattgctgaacaggttgctgaaattttgaacctcaatatcacgggaatcgatatcattgtgccaaacttataccaaccatatgatccgcaacaccctgagatggcggttgtgctagaagcaaactacaatccagcgatgttgatgcacttgttcccaatgatgggtcaagcgcggcgcgtttcaatgactgtcttacaattacttttcccagaattagcgattgaaaccgactaaagtaatgcaaaaaggcccgcacaagttaaactgtgcgggcctttttagtgttaatcgaaaagatgttttaagaaaccaccttttttggtgggtgcatcttgcgttgtggtttttggatcagggtatagtgtatcgagcgtaattgcctcatggttaatcgcgtctttggcaaccactaacaaaccgaaggccgttggttcggttttggctgtttcgttgttaacgagcgtgaacggaatcccgtgtgctgaaagggccactaaataatcggtagcagcgggattcttgccgtttaataagacggaatagggcttataatccgtaagatgcgcttcgaatttagcttgcgcagtggcgagttcctggttagtaatgcctaagaagacgcgttcacgtaatgagccgaggtagcggcggcgttcatcgggattggtttgtggtgcgccgtgcatggcactatccaagtgttgttgtaattgatcattatctgacaaaatagtcgcctcatttctgaattgtgctatattagaattaaacctaagtataccatgttggaggaaaaagatgtttacacgtgctgattttgatatttttgatgaccaaaccttaaagggccggttagacaagatttatacgcaacttgatccaaagtttgaagtatttggtgtgcaattgcaagcagaactcgtagtagaaacaaaacgcgaattctcgttgcatattgccaagcatttacgccgcttcaaaaatccaccaatgaatacttggatggcacttagtgagagctcacgcgggtataagatgatgccgcactttgaagtcggtttttgggatgatcggatcttcgtttggtttgctttaatggctgagatgccagataagacggattacgcaccgttattggcaagccaaacagaaagcctcttaagggactttgccgactatgatttaagctacgatcacatgaccaagcaaaaattcccaatgtcatcggagaacttgaaactgattcaagataagtttgctaagaccaaaaaaggggagtggctcctcggaaaagtttatctgaaagacaacccattattcgaccaacccgaagctctcatggccgatattcaaacgaccttgatgaagatggtgcctttatatgagttggtacagactaaatagattaaatcagacgcgtgtgctaagtaggcacgcgtctttaaatgcgcaaaaaaagagccagacctaagtctgactcttttaattgaacagataactgcttatctgttgtagaattcaacgattaaggcttcgtcgatttctggttctaattctgaacgttctggtaaacgaacaagtgaacctttcattgtgtcagcatcaaagctaacgaatgaagggcgaccaactgtgccttcgattgcatccttaacgattacaaggttcttagatttttcacggattgaaatttcttgaccaggttttacttcgtatgaaggaatatcaacacgtttgccatcgacagttacgtgaccatggtttactaattgacgagcttgtgcacgagtgcttgctaaacctaaacgataaacaatgttgtctaaacgttgttctagcaagatcatcaagttaacaccatgcttgccttcgcggattttaccagcgcgagcaaataagttccggaattggcgttctgttaaaccatacattaaacgaagtttttgtttttcgctcaattgcataccatattctgaaatcttaccgcgacggtcgttaccgtgttggcctggagcgtaagggcgacgagcaagttctttacctgtgcctgatagtgaaattcctaaacgacgtgaaagtttccactttggacctgtataacgtgacataaaaaaatcctccaataaatgttttggagtaaaataatccgatgtaaacttagtaatcgttcagttcacttattaacaatcttcacctttgcagccgcaaggttacacaattgaaccaaaactctgggcaaatgaactgttgacggctttaccgtttactgctgcattattttacacaatggctagtatagcgtacggtgtgcggcaacgtcaagcaaattcagattaaaattgcagcttttctaaagtttatcgctaattattgctgaaccgttatcttattcatgctataatcaaacatagtttaatgaattgaagtggatgaacggactaacaaatctgatttaaattgtaaaagggtgtgtctttgaatgttttacattctcattggaatcgtagtcgtcgcactgattggctacctaagtgttgttttttatcaacgttattttatcaaacaaattaaacaactagaagcacataaaggcgacttaatggcgttgccgattccggaacgcttaacgaagttacggtcgttacatttgacgggcgaaagtttgcaaaactttgatcgttgggaaaaacaatatgagcagattaccaaccataacttcagcacgattgaaggctatctttttgatgcggaaacggccaatgccaaataccaattcattcaggttgcacggattctcaaacaattgcgggcgtacttgactgaaacggatcaagatttactggatgttcaagatgctttagaaaatctacttgccaatgaagccgatacacgtcaaaaaattcagcgtctacgagaacaatatcaacaactacgtaaacgtttgttgactaagagtttttcgtttggacctgcattagatgcgcttgaagcaacgctaggtcgcttagaggtggattttgacgaagccaacgaactaacaacagccggcgaccatctaggggctaaggccattttgcagaaattaattactgaaacaacgcaattagaagaccagatggaacggattccaaagcgctataacgaattagctaacgagtttcccgaacaactggttgaaattaatgatacctaccatcaaatgttaaaagaacattatcaatttgatgatcggcagattgaagtcaaacaacaacaactaatggatcaacttgataagagcactaccttgttaagtgatttggccattgagtcggttgaagccaataacgatgaaattgcacgtggcattgatcaattatatgatcaattagaagctgagatgactgccaagaaggcagtcgcgacgcaattgccaaccaccgcgacattcgtgcaacatgctgaacgtcagaaccatgagctattattggaactcgatcatctcaatcagagttatgcactcacacatggtgagttggcaagcgccaaacaattacaaaagcaaattggtgaagaacaggcgttagttgaagggcaccaagcgaagattgccaaccacgaagcggtttacacggcgattgctgaagatttgaccgggattgacgaacggctaactgtcatcgaagaaaaacaacaagcaattcatgatcaggttgctagtttgcatcaaggcgaagtcgtcgctaatgaaaacttacgccagtttgaacttgaactacgtaacttgaagcgcgctgttgaaaaggttaatttacctggtttacaacagaaatatttggatttcttcttcgttgtttctgatgagattcaaaaacttgatcatgatttgaatcaaattaagattaatttagacgatatcgcgaagcaattaattctcgttcaagaggatttagatgaattgaaggccaagacggataccttaattgacagtgcattgattacggagcaattgttacaatatgccaaccgatatcgtgcagattttcccgccatccaggaagcctgtgtgacggtccaaactatttttaatgaagaatacgactatgctaaagctgtcgacttattggcaacggcccttgaaaaggttgatccaggtgcttacacacaagttgaaaaggcctattacgaccaaaagtcagacgcaactaattagtcacttagatgctcaccagtccgagacaagacgcattttgtctcggatttgttttgttaaagattaattggttgtctttaataaccaatttgctataatgtacaacgttaaaacactaatttttagtaagaaggatcgatatgatttattttgacaatagtgccaccactaaaatcgcgccaggcgcacttcagacctatcaagcggttagtgaacagttcttcggcaacccctctagtttacatgtgattggggaaaaagcctttcatattttagaacaatcacgccaacaaatcgctgatttattaggcgtagaccacgatgaaatcttctttaccagcggtggaacagaaggcgataactgggtcttaaaaggcacggcaattgaaaaacgggcgtttgggaaacatttaattacgacatcggttgaacatccagccatcattaaatccatgcagcaactggaaaaattaggctttgatgtgacttatctacccgttgatcagtttggtcgaattgatccggctgacttaaaagcagcattgcggcctgataccattttagtttcgatcatggccattaataacgaaatcggaacgtgtcagccacttgaagccattgctgatattttgaaggattatcctaatattcatttccacgttgatgccgttcaagggattggcaaaggcattcaagaggcgattttcaacgaacgcgttgattttgtgaccttatcagggcataaattccacggcccacgggggactgggattttgtataagaaacgcgggcgtcatttagcgccgcttttaaccggtgggggccaagagcatgatttacgttctggaaccgaaaatgtgccagccatcgcggcaatggccaaagccttacgtttgttattgaccgatgagactgaaaaagtacaccgccaagcagctattcgagaacgactctttaaccatatcagtcaatcggataaaacggttatgttttcacaactgacgcctgattttgcgccgcatattttgtgcttcgcaattaaaggtgttcgcggtgaaacaacggttcatgcgtttgaagaacacgaaatctatatttcaacgacaagtgcttgctcttcgaagaaagggactgaatctagtaccttaaaggcaatgcacgtcaatgaaaaaattgcgacaagcgccattcgggtatccctcgatgaatacaatacgctagaagaagcggatgcattcatcaaagcgttcgatcaaattaacgaacgcttcaaaaaaattaattcgtaaactaccatctaaaaggagataggcatgcaatacactgaaattatggttcgctacggcgaactttcgacaaagggtaaaaaccggaacgattttatcggtcggttaaacgggaacgtcacaaaggcgcttcacgagtataaacaactccggattcaccctaaacgtgaccggatgcatatcgttttaaacggcgacgatgcagaaggcgttatcgaacgtctccgtcacgtcttcggcatccaaaacttctcaccaagtatccaagttgatcgtgatttagattctgttaaagaaatggcgcttgccatgatgaaagaaatcggcaaacctgggatgtctttcaaagttaacacacgtcgttctgatcacaatttcttcttggatacgaatgatatgaaccgcgaattaggtggttacttatcagatgaattacctgaattagaagtgcaaatgaaaaaacctgacattactttgcgggttgaaattcgccaagatgcgatttacttaaccaaccaagtgattcaaggggctggtggcttaccagtcggttctgccggtaaaggaatgttgatgttatctggtgggattgattcaccagtagcaggttacttaacgctcaaacggggtgtcgacattgaaatggtgcatttctttagcccaccatacacaagcgacaatgccttgaataaggccaaagaattaacggcgaaattggtgccatacgttggtgggattaagtttatcgaagtcccattcacggaaattcaagaagaagtgaagcattctgtgccagaaggttacttaatgaccattcaacggcggatgatgttgcgtttaacggatcaaatccgtgctaagcgccaaggtttagccatttttaatggggaatctgtcggtcaagtggcctcacaaacacttgaaagtatgatggctatcaatgatgtcacaacaacgccaatcgtgcggccagttgcgacaatggataagaatgaaatcattgaaattgcgaaggatattgatacgtacgaattatcaatcatgccattcgaagattgctgtaccatttttgcaccaccagcaccgaagacccggcctaacttagataagacccggttctacgaacaacgcatcgatgtggatgccttgattgaacgctcacttgctggaattaaagtgacagaaatcaaagctggcgatcaattcttaaatcaagacgaagaaatcattgctgaactattgtaaacataatgtcaatcaaacttgtcgctgtcgatatggacggtaccctattaaatgaaaataacatccttagccctaaaacaatcaaagttgtcaaagctgctaaaaaacatgacgttaaagttgtgctatgtactgggcgaccactcaccggggtcacgccttttctaaaagaactgggtttaactgaagccactgactatgtgattacgttcaacggtgctttggttcaaaatacggcaactggtgaaattctagtgcgtcacactcttgcgcatgaccaatatcttgaacttgaaaccctctcccgccaaatcggttctcatttacacgctgaagacgatcaattcatctacaccgccaatcgcgatatcagtccttatacagtcggtgaaagtgccctcgtcaacatgcctgttcgtttccgccatgtcgatgaaatcgcacctaacaaggccttttcaaaagtgatgttaatcgacgaacccgccgtcttagctgaagccaaaaccaagattcctgctgattttttcgatcgttatcaatttgttcaaagtgaagcctacttcctcgaagtactcaacaagaacgccggtaaaggaaatggtttgcgtgatttagcaaatgccttaaatattgatcaatctgaagtgatggccattggtgatcaaggtaacgatttatcgatgctagaatacgccggcttcccagttgccatggataatgccattcctgaattgaaaaaaattgctaaggttgttactaagagtaaccatgaaggccaagatggcgtggcatacgccattgaaacatacgcctttgaaagccaagcctaatcataaggggagttattatgactacgttaattgatctcgtttacgcgtccccccttttctttttgattttatttattggtttacagcgatttgaaaaacgccgattaatcaacggcattgtgtttaactttttcctcttcagcgcattaatggatgctgcgctcattgtgattcgcctcaataacgaaacgctgaataacattgcaattgctgctgccattgttgtcgttctaatcgtcatgttcttctacttattcggtattgtcttgttgctgtggaacgcgtatattgtctggaaaaaagaaagtcacacgttatccaacatgctgaccctcctcattgcgttagccatcattggctcatttttcatcccaatcatcacgcgcttgttacacattcccgccgatattaaattatttgtcagcataattgtatcggtttttcttttgtatattccattgttcttctatttatatctaacctcactgattatctatcaattcaaccgcccccgttatcaacaagattacatcatcgtcttgggtagcggtttaatcgatggtcaattcgtcccaccgttactggccagtcggattaatcgcgccattcgattttatgataaacaagtcaaaaaaggccgccctgcaccaaaactggtcttttctggcggccaaggtccggatgagaagctgcctgaatcagttgccatgcaacgttacgccattgagcaagggattccgattaaagacaccctcaccgaggaaaaatcagtcaacactttacaaaacatgcaattttcaaaagacattatcatggctgataccactaaatcgaatcctaaaattatttttgcaaccaataattaccacacattccgcgctgggctttttgcaaagcaagcccgtttgaaagcagatggcattggcgctaaaacatcgcgttacttcttaccaaatgcaatcatccgtgaattcattgcaattctcaaaatgaaacagcatcaattcattttagtcgcaattgcaagtgtcgcatttgcagccttaactgttttactcaatcatatgtaacgtaaaaagccgttgtggacaatttgtccacaacggcttttttatgatgcctatttagcccgtgctgcacggacataatgaataatgagcgtcagtagaataacgccaaacacaattccagcaaacactaggttaggaatttcatagtcaatggctggaatcgacaagaataatttaatcgcgatgaagagaattaagatgtaagccatcggatttaattccggaattttcttcatcaattgggcgatgagttgggcaatcccccgcatgcagataatcccaatcattcccccaattaaaacaatcaccggattactagaaatcgctaaagacgctaatacggaatcaattgaaaaaacaatgtccatcaattcaatcgaagcaactgtgcgccagaaccgatgcggactactgattttagaacccgcctccggtgttttagcctgcttcggatgcccactctttctgaaataagcaatgactaagtaaattaaatacaatgaaccggcaactttaatttcccacaaatgaattaaataggtgccgacaccaataataatgaagcggaaaacataagcgccccataagccatacaccaatgacttttcttgctcaatttttgtaggtaatgtttgtgtctgtgccgctaatacaacagcattgtctactgagagtaagcattccataatcactaacgttaaaattaaaagccaatcttcggacgacgtaatgacagtttgccaattactcagttcaaagaatggttgatacaattgtacaatccaattcatctaaggttcctctatctctaatttctgttatttaattcctgtgactatcttaacgatttttcatgaaaataacaaatttattggttaattatgtaactagcacagcatttttattttataggctctggaaatacggtatactttttatagtaataattaataatattaatggaggtcgttttcatgattaaagaatttaaagaatttattatgcgtggtaatgtgctagatatggctgtcggggttattttgggggctgctttaaaaagcatcgtggactcattaacaaagaacttaatcaatccaatcatttcattattcgttggacaagttgatctatccggtattgcgcttaccattccaggcaccaaggccgtttttaaaatcgggaacttcctaaacgatgtgattaacttcttaatcatcgcatttgttgtcttcttaatcgtcaaaggattcaacaagcttcgtgacatgggcaagaagaccgaagaagaagaagcacaagtagtcgaaacgaaagaagaagtttacttaaaagaaattcgcgatttattagctaacaaagaaaaataaagtcacaaaaaaacgcctgaacaaattgttcaggcgtttttaattgttagcttattgaaatgtgcttccccaaagctaacccgttcaagttagcacgcttatcttttaaatctgttttcaaataatggactgactggtttgttttcatggattcgtttgatggcgtccccaataagtggcccgacagaaacttgtaccattttatcgattaatttttcttttggaagattaattgaatctgtaacaatcatttgcttaatcactgaatcttcgattcgttgaatagctgggccagacaataccggatgtgtacaacatgcgaatacttctgttgcaccagcatctttcaatgcttgcgcagctaacgtaattgtgccggcagtatcaatcatatcatcaatgatgattgcgcgtttaccgttaacattcccgataatattcatcacttcagaaacattcggtcttgggcgacgtttgtcgataattgcgattggtgtctttaagaaatcagctaatttacgagcacgtgtaaccccaccgtgatcgggtgaaacaacaacagcattttcagccaagtcattgctcaagaaataatcagccaataaaggagcacccatcaagtgatccactggaatatcgaagaacccttggatttgtacggcatgtaagtctaatgctaaaattcggttagcccctaccatcgttaacatattagccactaatttagcggtaatcggttcacgtgagcgagccttacgatcttgacgtgcgtaaccataataaggtaacacaacattgattgttttagcagatgcacgacgcaatgcatcaatcataatcatgatttccatcaagttatcattaactggtgcagatgttgattgaataatgaaaatttcgtcgccacgaatactttcttcaatattaatctggatttcaccatcactaaaacgtttaacagaagattttcctaaaggaaccccaacttcagccgcgattttctcagctaagggcttattagagttcaaagcaaagattttcaacttagggtcgaaatattgttcagacatgtcagcctccaaaaaatttatgttagtacctatttaaagtttaggcattttcaccccggaaatcaagattaaaacttaaaaagttcacaaatgttgtaaagtaagcgctgttcattagaaacgtgagagaaaaagaaaaagttaatagcgattaccatcgaacctcccgtttagtatcccattatatccccaaaaatgcttgtttattttggattatggattaaattgtcatttagcgcaagacaaggtacactcattgaaaaaggcggttactatgacccgccttaaatacactatttttaataatctctatcttttaattctggtaattattattacttccgatcgcttatttcacctcagcatgccctattttattcttggtcttattctattcgttgccgttttgatttatcagtatcattttttctaccccagtcacccgaactacaatcctaaaaattatcgcattacaaaaatgggctgggcaaccaccgctgttgggtgtcttatcatacttcttctaatcttattttcaagtggttcaatttggatttggcccgcttttctaatcgccttcttaatacgcgattatttctcaactttaaaataactacaaatatcaaaaaaatcgtccgtaatctcaaaaataagattacggacgatttttattttaagatgtgctttacaacactaagctaatcatcataaacacactttaatccaaaacgtgcttcttgtcaccgtaatttccgcttaatctaacatcgtattaatgctcaattactaaccgcgacagccagcactctattgccattcttcgtcatttgctactggtagttttgcccagtagttttctttgtttgtttgacgggcacgggcgatggccattgccttttctgggacatcatccgtgatggttgagccagctgcaatgaaggtgtgatctgcaatttcaaccggtgcgacaatgtttgagttgctaccgatgaagacatggctgccaacatttgcgtggtgtttagccacgccatcatagttaacaaagactacgccacagccgacattaatatcagtgcctaatgtggcatcgccaacataacttaaatggccaatcttcgtgcgatcgccaattttagcattcttcacttcacagaagttcccaacatggacgtcttcgccaatttcagcgtttgggcgtaaatgactgttaggcccaatgtttgaccccgtgtgcatgatagctgattcaatcgttgaacttgtgatttgaatgttgtcttcaattgttgaatcaataatagttgagccagcaccaacgaaacaatctgaaccaattgttgtgttcccttttaagacgacgttaggttcaacaattgtatcattaccaatctgaacgcccacttcgatataagtattttttggatcaattaatgtcacaccattacgcatgtgttctgtattgatgcgtttacgcatcacttttgttgctgcagcaagagcaactcgatcattaacacccattgattcttcaaagtttggcattctgtaagcagcgacaatttcgccttttttcttcaagatttcaaccacatccgttaagtagtattcaccttgtgcgttctcattcgtcacttcgtgcaaagcttggaataaggtcttgttgtcaaagcaataaacgcccgtattaatttcattaacagccgcttctttatcattagtatctttttgttcaacgattttttcgacaatcccgatatcattccggataatccggccgtaacctgttgggtctggggccgttgctgttaaaatcgttgcctttgcgcctttatcatggtggtatgcaaataatttttcaaaggtttcagcggttaaaagtggcgtatcgccactgaccacaatcgtaatgccatcttcatctttcagtaaagcttcagcttgtaaaaccgcatggccagtccctaattgttcagcttgtaatgcatattgtgaccggtcgccgagataatctttcaccttttcagcgccgtgcccaacaattgtgaccacattggttgggtgcgttctttcaacttgggttaaaacatgatctaccattggtcgaccacaaacctcatgtaatactttatataattttgacttcatgcgagtacctttacccgctgctaaaataattgcatttttattaaccatcataagctcctcgtcattcgtgattactggtctattttagcttaaatactaggctagagcaagctaatccgtattgaagtttagcgctttatcccgtatactggaggtactttattgcggaaggaagtcggccatgccaaaactgacaaacaacattcgattaatgctcggcagcatcattgttgccattgccttactagttggtgggtattggtctacctcagctcggcatcaaacacaccaagccgcagtcacgtcctctaccaaatcacaatcgcatgcgaggcaacaatcgataaaatcaaaaaaagcggctcacccgacaccaattgactggcgtgcgccttccgaaaacaaaccatatcctaatttagacgaacaacccgatttatgggtcgacgtttcaattgcacagcaacgtgtctaccttaaaaatggcaatgatcttttgtacacaatgcatgcttcgaccggttcccctgagtcacccacaccaactggtaccttctatatcgaagctgaacacggcgactcatttttcaatgcaaattccggggaaggtgccaaatattggcgctctttcctagatcatggtatttatctttttcacagtgtgcccacagatgaagctggcaatttcattccagaagaagcagagcaattaggcaaaaaagctaattcacacggctgtatccgtttatcagtagctgatgcccaatggttctataccgcaattccatataatacaaaagtcgtcattcactagcttgaatgacgactttttacttaataacgttcaaaaggagatgccctgatgactcagacaacccaaaaaacgattgccacggcttttaaacaattaatggttgaacaaccttttaataaaactagcgtcaccaccatcatgaataaaactggcattcgacgccaaaccttttatgactatttccctgataaatatgcgttattagattggatttacgatcaagaaatcggtgtctacatcgacgagcatctcagctatatccattggacacaggtgttggcgcaactatttaactacttcgatgctaaccgcgccttctatcaaaatgctttgtcgattgaagggcaaaacgccttcgaacgccattttattcatcacgtccaccaactgattaatcggattattcaagatcttgctagcgcccatcacattacgttatccaccgactaccaagcctttttacttagttttctttccaacgcattagttgcttacaccgctgaatggctccgcagtcgtcatccccaatcagtttcaaaagtaatcactgccctaaaaatgacattaactgatacaattaacggtttattattacggacaggacacttatatgaacaacggtaattataagataatcccatcaaaatttaatttcatatttattgaccattcttagcgtagttggcttccacgactgctttttctgcttgccaccagtcttcattatcacgataccagtcgatggtatgttgtaagcctgatttaaaatcagtgaattctggttgccagcctaattcttcccgtaacttcgttgaatcaatggcatagcgtaagtcatgacccggacggtctttaacttgatcataagcatctttgggttgccccattaattctaagattaattccaaaacatttttgttattttgttcgccatcggcaccgattaaataagtttcaccgattttacctttagttaagatggcccaaacagcgcttgagtggtcattcgtatgaatccaatcacgcacgttttgacctgaaccataaagcttaggacgaatgccacttaatacattagtaatttgacggggaataaatttttcgatgtgttggtatggaccgtagttgtttgaacagtttgaaatagtggcttgtagcccgaatgaacggacccaggcacgcactaataaatctgaactcgcttttgatgatgagtaagggctacttgggttataacgtgtttcaggtgtgaatttttcaccagcaccttcaccatgacctggtaagtcttcgcgcaatggtaaatcaccataaacttcatcagttgaaacgtggtggtaacgcacgttgtatttacgacaagcttcaatcaacgtatatgaaccgatgatgttcgtttgaatgaaaggtgatggatcttttaaagagttatcattatgactttctgcagcatagtgcacagccgcgtccgtcttttgaactaacttatcgactaattcagcgtcacagatgtcgccaaccactaattccacacggtctgctggtaaaccggctaagttagcgcgattgccagcgtaagttaatttatctaaaaccatcacgtgaacttctggatggttattcaccacataatgcacgaagttagaaccgataaagccggccccaccagtaacaataatatttttcaacctgaatcctcctaataatatgttaatcatagtattcattcttaatttatttaaatataacagcaatatctatttaatacatagcttaccgtattttaaaatcgcattaccgtcctcaacaatattttaaagttattactagttacattattaaaaatcatcttttcttttgaatattattctatataaaaaactgcttaaactcagtctccaaaacagacatcattttaagcagtttttacttcttatttaatcttcaacggtgctaattgggcttcaattgcagctaaatccgtccctgcttgcaacaatgccgctgccgtatagcaaccttcgattaaagcaacatcgtatagatgcaccgttttatccgttagttcttgggccaattcgaggttcatcttagcgctccctaagtcgtagaaggctaacaattcttgcccggcattggcttcaaaagcactttgaatcttcattgcgctagtcccaataccaccttcgtccgtgccaccagcagtcgttactgaaacatcagcggcaacttctttaattaaacgcgctacaccggccgcaatttctggtacgtgagaaacaatcacaacaccatattcactcatgataatacccccgccattaacattgtagtaaataaatacccactagaagccgcccctggatcaacatgtccgattgagcgttcaccgacataagatgcccgacctttggttgcttgcatatctttggtcgattcgacggcagcttcaattgcagccacatctaaagtaccatcttcaaccgctttgacaacgggagcccaaacgtcaatcaacgtcttttcaccaacttgtgcatgcccgcgtttttgaattccttctaaaccggctgccaataatgggccgacttcaagtgtcgtactgcttagttttgccatttctaaaaaggctgtcccatagagtggaccagaagccccaccaactttgctgatgagcatcatcgcagtcgttttcaaaataccttgtacatcggttggctgttgcttggtcaatgcttcatgcacagctaacaagccccgcgacatgttattaccgtgatcaccatcaccaatcggtgtatcaagttcacttagataatctttttcagcttgaatttttgcatcaaacaattcaagccatttcaatgtattttcaactgttaacatggtatctctcctttaccaaccaatcgttgtgactggttcatctaatttagcaacccaaccaggttcaattaatttcataattgttaatgacacaccggccatatctaaagaggtcatataattgccgacttttgtgaagtcgacttcaacattttcagcggccaagaggtccaagacatcattcataaagacgtattgttccatcagtggtgttgcacctaagccatttaccattaccgcaaaatgttcgccggccgtcatgtggtgggcttcttttaacttgccgactaattcagttgctaggtgtttcgaatcttgtaatttttcacggcgataacctggttcaccgtgaatccctacaccatattcaatctcatcaggcgctaattcaaaccccggttttccgacctcaggaacggttgcgccagataaggcgaccccgattgtcttaatattcggtgtaatttggtgcgctaattcttcaattgcttcgataccagcaccttgacgggcataagcacccagaatcttgtggacgaagattgtccccgcaacaccacggcgtccttgcgtatacgtactattttcaacagcaatgtcgtcatcaacaacgattgagcgaacgtcaatatcatccatagccgccatatccttcgccatttcaaaattcatcacatcgcctgaataattcttaatgactaagaacacaccacggcccgcgtcagctgctttaattgcttcataaatttgatcaggtgttggtgatgtaaagacttgtccgcacacagcggccgtcaacatgccatcgccgacaaaaccagcgtgcgttggttcatgaccactaccgcccccactgacaatcccgacttgtggccgatgttttaaatcggcgattttcatcactgcttctgttcctggaatttgtttgagttggtctggataactccgcactaaaccttggaccatctccgttacaatttggcttggatcattcattatttttttcatagtaacctcctcttaaatataacttcagtctatgttaccgctgtcatttatgcaacggacaaagcttggaaactgtccgaaagcacttcaaataaaaaaagcacccgcacaattaacctgtccgggtgctatcaaatcgtttaagctaagcgatctgcattctttgttaagtaattaccataactgacacttaacgttttattttcaatatcaactttatcaaccttcaagattgatgtgtaatcatcaaccatccgattgccttcgaaatctgattcagcaaagacagaaatgccaaccatttcagaatcaaactcttcaatcaagctcttcatcccattgacggtgccgccgcctttcatgaaatcatcgacaattaagactttggaattttcaggtaagctgcgctttgaaagttccatcttttcgatgcgagctgatgaaccagaaacatagttcacactgaccgttgaaccttcagtaatttttgaatcacggcgcacaattacaaatggcacatttaagtacatcgcaacgctctgtgcgattggaattccctttgttgcaacggtcataacagccgtcacttctttacccacatattggttggcgattaaacgcccaacttgccgtaatacttctggacgtccaagtaagtctgataaatagacgtaaccaccaggtaataagcgatcattttctgaaagccgttgtgccatctcagcgataaaagcttctgcttcatcttgtttaatcattggcatgtagcgcacaccaccagcagcgcccggaaccgtttctaagatccctgtgccacgattaaaaaaggtccgcttcacaattgataaatcttcactgattgatgacttagctgattcgtaacggtttgaaaagaatgtcaatggaatcaacgtatgtggtctttctaataaatagcgtgtcatatcgattaatcgatcgcttcttctaactttcatgttgaatacccctctatatattactttactgttatttccgaaaaaaactgtctaccaatcaattatatagaaatcttcggttaaatcctagtcttttttaaaaaaagagcttaattgttcgcttttatcccattaaagcgattcctacgccaattaaaaacgcctcaaccatttgattgtcggcgttttattatggtttcaatggtttaaccagatatacctcagcgcaaaatccggacatactattataaatccgttgagcccgtgaatactgactacagataccaaataccgttggaccactaccactcatctgagcaacatccgcaccaaactgcaataaccgctcacttaattgcttgataactggataacgttcagtcgtaatcggtgctaaaacattccccatattgcgagtcattgcatttaaatctccagcttcaacggctgcaaccagcgcctcagtttgtggatgctgttgaatctggtcgcaatccaatgcacgaataatccgcggcgtcgaaacactgacttccggtttcacgacaacgacccaaaaattcggtaatgacccgagtggtttgatctgatcgcctttgccagtgacaagggcggtttctccatatacgcaatatggcacatccgaatcaatttgtagccctaatcgcgccaattgttcgcgcgttaaaccaagttgccatagttcgtttaacccccgtaaaacagcggctgcatcagaacttccgccgcctaagccagccgcaactggaatatgcttatcaatttcaattaaagcaccggttggaatctgataggtgtgttgtaataattgagctgctttgtaggccaggttacgctgatcttctggcaaaaagccacttgatgtgcggacctcaattgcgggatcatcgcgtaatgttatctgaacatagtctgccaaatcaatcgacgtcatcaccatctgccactcaggttccccatcgtcatgtagaaagagtgcatctaaactgagattgattttagcaggtgctttttcaattcgttgcatcacattcaccttttacctagcatttaattgtttcattatactcatatctgcttgtaaaaaccaaccttttaacaatgcatccaaaaaagcactgacaatcatctgtcagtgctcttcagtcgacattattgattatcttttaccataatcttatgtctaaattcattcattaaatcaagcatctgcttggcattttccttaccaaacgtctccatccacgaggcaaaccgattatggatcttcggatttaattcttcaactgttttttgaccagacggcgttaaatttaaaatcaaccggcgccgatcatcgggatcaatttcttgtgtaatatagtctaatttaagtaaaacacgaatctgtcgagaaattgcaccgcgtgttacgcctcgttttttagcaatatcaattagactcactgaattatcatcagcaatctctttcataatcagatattgttcaaaagacaattggtaagcttgcgttggttcagaaaccaagtcttcgacatatttaatcgccgacatgtaaagttcaacgtattcatccaacaattgactatctttcacaatatttcccacctttttatttattttcttaactgtaccacaaatctttaagcttgactatttggtgtttgcgttaacttttgttttaactctccgccgaacaaaccggcgaagaacactgcacaaaagatcaccaagacgattaagactaaccaaagttgtgaaccattgccgttgacaacttgttcgaacccactaatcgtgtaagtccctggcaagaagattgccacaccacgatagaagcctgaaagcatgtcattcgggaagagtccccctgtaatgatgagttgtaagaacaataacccgaaggccattaaaattcccatcgttccaaaaagtttatccaatgctaaacatgcaagggtaaagaccgcactcgtcatcatacttaagacgaagaatgcgaacggttgtgcaatcgtcaatccaaaaaggtttgcaaagatatcaattaataaggcttgtgcgacaactacgccagctacaaccaacatccgttgcttaagtccactatgtgctaatgtttcaccatagcgataaagtgttaattgcgtcaacattgccccaacaaagaagacaagtgttaagactaatggcgagaaggtattaattaatgcgccatgatttgtatctgatagtaattgatctttgactggttgcacgaaatgttctacatttgcggaacctgttgaaagattggcaacttgcttgctaccatcgattaacttgacgtttaataagctaatcccagcacccgcttggcctaagccagtcgttaattgtccagcaccatctgccaataagcctgaaccctcgttaatttgtgtaatgccagaaacaagcgttggtgctttttggtttaattcttgtagaccatttgctaattgatggctaccattgttgagctgttggacgccactgccaagttgactttgtagtgtttgcaatccattattcaattgttggccaccatcattgagttgttgcacaccacttgccaaagctggtgtttgcccatttaatgtttgtagaccagcttttaattgttgaccaccattgttaagttgattgttattagcaactaattgattgctccccgtagctgcggttgaaacgccattcagataagttgtcaagcccggcatcaatccaggttgtcctaccttaccttttaatccttcctggatttgaactaatccatcatgaatcatgtcagcggcttgaatcccgcccattgtatcaactgtattgcctttttgtttcaagccagtatcgactttggctaaccccgctgtcagtgtatcaatcgcctgtgtggcaccatttagcgctaatggcgcttgatctttgcttgccatcttcgcaatgccagcttttaattgggccatattatcagcagtcttcgttaattcatcggatactgcttgtaattgaacacccgtatcactcatattattgcccatcgtgcctaagttggcttgaatggcttgcatgttctttcctgaagattctaattggctaccagcattgagtaagtcttttttagctgcaccgccaatcattattactctcaacgcgatagaagggttatcagccaagaatgttttaaatgtcggattgttttcggctagatcgtttaacttctgtaattgtgcaccagcatcttgtaagctgctcgcgacactatctgttttatcggtattgtatactttatcgttaatttgacttaaattagacccactatcttgtaaaagggcacccgtatttttcgtattatccgcaatcttcaataagtctgctttgataatttcggaattatcattattggaatggttaactttttgatctaactcttgaataccagcatttaaagcgcctaacccagccttcaattgtgttaattgttctttattaccatcaagactcgcttcgatttcatcagctgccgcggtcaacttttcgctcaactgcttggtgccatcagttaattggtcgacaccgccattgatttgttgcccaccagctaaaattgtttggttattggctgctaattggtttaaaccagcattaatttgaccagcgctagctgtataatctccaagcccagttgaaagttgcccagcaccagttgttaattgttggaccccactttgaagtggtgctgttttaccagctaattgttgtaagccacctgaaagttgtcctgaaccagtaacaagttgttggacaccagatcccgttttgtcagataattgttgtaagccatctgaaagctgacccgatccagttgttaattgttgcacgccacttgccaatggcgcactaccatctgccaattgttgtgtcccactatgcaacacatttaaattatcatagatttgttggctcccatttgataattgaccggctgctgtgtttaactttttaacgccattgctagcttcttgtacgccactgcctagcgtgccgattgcaccaagcaaggcttgattataagcttcttgaattttttgaacgacactgcccttcatttggttcacgacttgggttgtaatcatgccggccatgtagttatttttcttagacgtttcaacttttaacaagctgactttaggtgacttatctaacgcggttgtcgcatttttagaaaagtctttcggtaagacaacctgcatcgcgtatcggccgctagctaagttcgcttttgcatccttagcactgacaaattgccaatcaacctggtgatcattacgcaacgtttttagtacctgttgcccaactgccaccttttcccctttaaatgttgcggattgatcttgattcacaaccgcgactttcatatgtttaatattagtggtctgttcgtacttaataaaattaaatgtgattagtaatagtaaaatcggaattaagcagatcataataatgaacccacctaacttcactttgttctctttccaattgccaaacatattctttctccctttttgtatacgtcataatcattctatatgatattgttttatcaaacgaatgtcaacaactaatcaaccacgtgaagtatatggcgattcgtcaatctgctttttgaacaaaaaaagcactcaaccagttggttgagtgctactctattcttctattttaaactataggacaattggttcttcatcaaactcaatctcaatcgatttcgttaacaaatcagcatagctgtatgaaacacgttcaaaagcattttcatcctgatctaaatcgactacaaatactgctggaaaggtttctttaagaattccctttcgctttgtaacttttttgcgcccagcttgagcgacaaccattaacttgtctccgatatgcccatcgagaccgttcttaatattggcaagtgtggttggcattatgcttcacctcttcgagggatagtataccatataaacgaaaaatttgcaattataccattgtaccaacgatttggcaattacttacttagcttttttagcaaagattggctgattattcagcgcatcgcttaattgggcaaattgttggatactcaattgttcagcacgagcgctcggtgcaatctcgactgcttctaaggctgttgttaaagctgctttgacttcatcttgtttaccaaattgattttgcaagttattccataatgtctttcggcgttgtgcaaatgcgccacgaaccaattgatcaaataaggtttgattagcaactgttacaagcggtgctttgcgccccactaattcaacaatcgctgaatcaacattcggttgtggcataaaagctgtcttgggcacaataaaggctaagttcacttctgaatgaagttgaacggcaatacttaatgagccgtaagcctttgaaccaggttcagcgttgatccgttctgccacttccttttgcatcattaagaccatgcgatcaattggcaatcctgcttcaagtaagtgcaacatgattggcgtcgtaatgtaatagggtaagttcgcaacgattttgagattatgcttaccattaaattgttcggcgataatcgtttttaaatccgcttcaagaatatcttggtttaaaatcgtgacgttatggtagtgattcaaagtatcttttaagaccggcattaaccgttcatcaatttcaaaacttaatacttgatgcgcttttctggcaatttgttccgttaaagaaccgatcccggggccgatttcaatcacatcgtcatctttggtgatatcaccagcttcaacaatttgtttcaaaatggcgatgttggttaagaagttttggcctaagctctttttaaacttaaagccgtaacgtttgagaattttccgggtacgctcgggatttgcaatatcttccatattaatctcctaattcctgtttaatttgtaatagtgcagcgccaaattcagcttgcgtcacttggaacatcttgagacgcttgtaaagttgtttgctgttggtgtaaccaatgtgcaaaatttcgccgagtaattcgcgccgtcgctttgaatcagcccccgcaatcaagcccgccgttaataaatccgattgactgatttgttcgtctgcttcttcatcttgtgttaatagatgctcaagtgcttggacaatcgccgctggttttgcgtgttcaatgcctaaactgccgcctgctttttctggacgtgcttctgtccgtggtaaaaaggcgtgttcgacgcccggtacattttgagagatgattttacgaatcttctcgccatgaaaatcgggatcggtaaagacaatgaccccgcgtttttcttgagcgagcgcaattttttcgataatttcttcattgattgctgaaccgcgcgtttcgattgtcgaaacatctgggaaaacttcccgtaaccgcttcgtatcgtcgcgcccttcaacaacaatcacttcttgaattgtttttttcatagtgctcctaacttaaaaatccggtgggcattcgcatacgtcgctgccgcaatttcttctggtgccacatctctgagtttagcaatcgcttctaccacataccgtgtgtagcctggttgattctgcttaccacgataaggcgtcggcgttaaataaggtgcgtccgtttcaaccaacatcacgtccaatggacatgctttagctgcttcatggacttcatgcgcatttttaaaactgaccacaccgctgaacgaaatctgcatgccaagatccataaaccgtttcatccattcaacatcgccattaaaactgtggataatccccccacaatcacggacatctgtttcttttagaatcttgtacgtatcttctaacgcgtcccgcgtgtgcactgaaattggtatatgcaaggatttagcaatctcgatttgccgtgcaaaaacggtttgttgcacatcgcgtggcgaagtatcccaatgataatccaaaccaatttcacctagcgccactacttctggtcgttgtaattggtcagtcagcacggtttcttctgccttgtgataacctttggctgattcagggtgccaaccgataatggctgataaaggttcatattgcgctgctaagcgcaaagcgccctcatttaatactgtatctgaaccaacaatcgccatttcaacaacaccgagttcagcggcttgcgcgataaaatcagcttcttgccctgcatatggggtatcattcaaatgcgtatgtgaatcaaaaatttgcatttcaatctccttttagtgtcctcattctgacagttaaaacgtgctcttgccagtagctttctgcgctttgttacactttcaaaccggcgattccatcgccaattcgccaagttagacaaatgctcaaaagctaaccactggcaacacactcttttccattaaaaaggctaaaaggcctacagaatgtaaatgccttttagcccttttgacgtttctgttattttaaattaaccgatttgtgagccgttcaccaagttgtttggcacaactgctaattcaacttgtccgtcatgttctgctgataacaacatcccttggctcaattcgccacgcaatttacgtggtttcaagttcgtgacggctaagactttcttaccgactaacgcttcatagtctggatagaattcagcaatgccggaaacgatttggcgatcaccttgatccccagcatctagacggaatttcaatagtttatcagcgccttcaaccttggcaactgccttaatttcagcaacgcgaatttcggtttgatcgaaatcttcaaacttgatggcgtccttttcactgactaatgttgttgcttttggatcgaattcagctttggcttcagctgcttgttgcttagccttcactttttcgttcactaagcccgctttttgcgcttgacccatttgatccttaatatatgcgacttcttcatccaagtctaaacgtgggaagattggggtccctttagcaaccacttgaatattggctgggaatgtcccataaaccaattcacgttgcgcaacttgatcgaaatcaagccctaattgtgcaaacatatcgcgtggtgcatgcgtcatcacaggttgtaataagagcgcaacaatccgtaaactctcagccaagtgggctaagacactatcgagttccgctttgcggctgtcatcttttgccaagacccatggttctgtttcatcgatgtacttattcgcccggctgattaattgccaaacggtatctaaggcatcagagaacttcaattgatccattaagctggtatattgttcgattgtttctgtagctgtcttttgtaagtctgcatcaaatggtgtcacgtcagcttgatacgctggcactgccccattatcatacttgttaatcattgcaacggtccggttcaataagttgcctaaatcgttggcaagatcgtagttaatccggctgacaaagtcttccggtgtaaatgtcccatcattaccaaatggaatcgcgcgcattaaatagtaacgtaaagcatctagaccataacgttccactaacatttcaggataaactacgttgccttttgatttagacattttaccgtctttcatcaacaaccaaccatgaccaaaaatttgttttggtaatggcaagtctagagccatcaagaagattggccaataaatcgtatggaatcgtacgatttctttcccaactagatgcacatcagcaggccagtatttattaaacaattcgtcgttgtctaaaccgtacccaagcgctgtgatatagtttgataacgcatctaaccacacgtaaaccacgtgcttcggattacttgaaacgtgaattccccagtcaaatgagattcgagaaaccgataagtcttccaaaccaggtttgatgaagttattgatcatttcattacgccgtgacgccggttcgatgaaatctgggtgttcttcataataagccaataagcgatcagcatacttgctcatcttaaacttgtaagtttcttcagcgacccgttgaacttcatgaccagatggggctttcccaccgatcacattgccatcgtcgtctttataaacttctgctaattgtgattcagtgaagtattcttcatcagaaacagaataccaaccttcgtatttaccaagatagatatcgccttgcgctaataacttgtcgaagattttttgaaccgctttgacatggtattcatccgttgtccgaataaatttgtcatttgaaatttcaagagtttgccataatgccttgatgtctttagccatgccatcaacatattcttgtggggctaaatgcttttcagctgctttttgttcgagtttcaagccgtgttcgtccgtccccgtcaagaagaagacatcaaagcccatcaagcgtttataacgcgcgatgacatcggcggcgattgttgtatatgagttaccaatcgttaatttaccagatggataatagattggggtcgttacgtaaaatgttggttttgtctctgccattaggttcgctccttaattaaaaaaacgagaatcttaacaattctcgacttgcttaaataatgccatataagtaatcaaagtatagcacaaaagagcagtcatttaaacgacaactcacactaagccttcattaaaataaatcaatctgttcaggcgctttcggggctaaatcaggaaattctagcccaagtaattgttgtaattgcaaagcattatccgcagcatccccaccagaattattgttaaaaatcacggcaacttgttccgcttgatttttaatctgccgcacagcatccgcaaaaaattgtaattcatcttgatcatagcgatacaatgttcgttgcttccgccattgggcacccggattctgccacccggccatattacgaccatgcaggcgcaacatcgcaaacgccggattggtgacaaccggttcaaacggcacactgttcgtcggtgtttgtgcttcgtctgtgatgacgtgtgtcatgtttagctgcttcaaaaaggcgtacatctgttgcttaaaagcgtcatcgtaccaggattgatgccggaattcgacagcaattggcacatccggtaaccacgcgcgaatttgtcgtaaatattgactattttcctgattcagttgaaaaaatggcggaaactgaaataagaccgcctgtaattggccggccttaattagcggttcaattgattggcgataccgcacaaacaattctttttcagtactcgtaaactcggcgtagtcttcttggcgggtcattgcttggtgtgctttaacaatgaactgaaaactggctggtacttgcgtcaaccagtttgcgctgacggttggtgcgcgtaagccgtaataaaaactatcgacctccaccactggcagaaattgcgcgtagtcgtttaatgttaactgctttttgctgggcattaatgactgatgttctgaccaagtagttaatccaattgttatcatatccacacctctagaaccgttggaattgttgaatgaacaaagcttcttgttccgttaaatccttcaatgtgacaattaattgttgtcccatgcgtttataatttaaccgaatccgcgataggctaaagtcgatgactagcagcagcaacattaagctaatggcgcgcccctcagaaaacgccacccctaaaagctgtaccttgcccgttgcagttaagaatttaaaaataatgtataacgagaacagttcttcgacgactctaaaaaaacgaatcccttgcaacttcttctttaaaaccatcaagaccatcatcgtttggtcctttgtcatcatagtgcttcctctccttctcttggttcagtaatgggaattgcttcaaaaaaaatcatctgatctgcatgaaaatccgtgtcataccgattgagctgaccgcttaaaacagttggtaaaatggcctgtaagtctgccacaattccttgattatcagcagcttgtgcccattctggttcaaataattgaagcacgccttcgcgcattccgaccggataaagtggtagttgcaccgttggtaaaatatcgactaaaaaaatgtcaatcggtgcaatcgtttcaccgtcgatgtgccaatcaatccaccccgcattttggagtgtgtattggttggtttgtaaacccgtttcttcaaataactcccgttgcataccactgattggcgtctcatcgggttctgttttgccaccaatgccattccaaagcccagcaaatgggggcttaatccgattcaataatagtaaagtcccgcgatagcgaattaccgctaaattatagcgtcgtttagtcacagttcaatagcctcacatctcataaattagtttcattttagcatattaagcaaaagagtgctgactgtcgcggttagtaattgagcattaattcaaaaatagggattatggcgcccttcagccatgattgccatttttaggttaaccggaaaaggcagttcgaatcggcacgtttcaatcaaaaaagagcgctccgtctccgtttcgctctttccacattatttttcttctgcttctttcatcgccttcatcaattttacttgatattgtttcgaaattaaaattaacgtttggtataaatcccttacgtaatctgcgagtgctggatctttaaccgcagcaaggcgcgcatccatcaccgctttttcgcgttggatgtccgtcaagccgattttttgttcatgcttgattgttgcaatttgcttggtgacttgcatgcgttcttcaaataaaaccgccaattgggcatcaattgcatcaattttttgatagtgttcagttaacatgggctcactccttagttgctagtgcggcaaaaacgggtgtcgcatccgcttgtatcatagtgactggcatttcaaattgtaatgcctcttgattaatcgctactaattgggcatctggacggcgatattcaattaaacttgcaaatgggtacacacgaaatgacgtcccgaccacgacaattaaatccgccgcttcaatcgcctgaatcgaccgttcaatcaccgtcggatcaatcggttcttcatataaaacgatatttggtcgcaaaatcccaccacaatcttgatgatgcatatcctttaaataggcctgataaggcactgcttggccacacttttggcagctgacacggtataaactaccatgaaattcaatcacatcccgcgcgcctgcttttgtgtgcaacccatcaacattttgggtgataatctgccccttttgattcgcaatcgtcgccatcacttggtgaatgacatttgggtttgcttcaggaaaatacatctgctgcgtgacaaattcataaaaactggctggattggtgattaaattcgtgtgacttaataaatattctggattggcttgctgatgatacaaccccgttttcgatcgataatctggaatgccagaagccgttgacacgcccgcacccgtcaagaaaacaacatgctgtgccgcatgcaacattgatttaaaagtcatcaccatcactcctttttaacgtgcttttaattcgcagctttctgcgctttgctacatcagtcggccaatcgcctttggcgcttatccgtctgattaggcaagtgctcaaaagctaaccgcgaattaacgcactctgttctttaacgtgcttttcaagctaactttctgtgcttagcactgtgaatcaaatcatcgactgcgtcgctaattcgcttccctgtgctaatgctcaaaagttgaccagcttgaacgcactcattttcttaatgaatacggcattccaatttcatctaagaaggtttgcactgataaatcatacaatcgtttgaaatattccggtgttgccttgtcttctggaatccctaagacaaaagcattttgttgatcactcttaccaattccaacatacgctttttggttcgttgcggtcgcaaatagattttcggaatgtaaaatatcgtagacttggcgcacttctaatcgtagttgccgttcacttaataccggcgtcaatgtcaagagttgttggaggttcgtttcagcaaatcctagggttgataacacgcgatcaaacgcaacccacaagttaatcacagcccgccgtaatgtgaatggtgaatcaattgttttgcgtgccaacacatgatagagaatttcggcttgggcaaacgcaatcggataatcagccgtccactgttttaacagttgttggttgccaccatcaaagaagacgagggcatctaacagcgttaatacgcggaaaatcacccatctattttcgggatcgtctttttccggggtcagattatctcgtagaccttcaaggtaggcttgtttagtttcaacatccacaaagccatgggattcttgttctttttgaatcaccatgtgcacagcggcattgtacaaagttgtgccggtcgcaaccaattgttcatcgagttgcgcatcctgcgtggtgacatcggtcatgatttgtggaaaaccgattgataataatagtaagtgcaataattcgtgtgataaagcataatcggccgctgtcgcatcggtaattaagattgccaagctgccatcgttatttaaaacgcgttgtgcctgatcatgttttaacatcccagacgctgcatctgcgacccggatcttaatgggttgaggataattcttttgaacctggtcaattaaactttggatttctggggaaaattcagtagttgtcatttttggtctcctttgagtaaacagctttgcttttcatgataagccaaatccagttaaattaccaacggtttagaatgtatgaaagcggttaaaactgttataataaaggtaatcttaatttaaaggacgtgttgactatgacagaaccaaattcgcgaaaagtaattttataccttgctcagagtctagatggcttcatcgctgaaaaagatggtagtactgcttggttagctgcactcgattcatccgaatcagacgctgcaattcaagctttccaacgcaccgtcgataccgttgtgatggggcgtaagacatatgaacaaagtcttaaattagccggcacctatccttaccaagataaaaacggctatgtcttctcgaaaacgttacatgatacagaagatcgaacacatgtcgttgctgggaatattcctgagttcatgcgtcaattaaaaaaagaagatggcggcaatatctggcttgtgggtggtgcagaaatctttaccgaattgcttaaagcccagttagtcgatgaactcatcatcaccattgcgccagttctcctgggtgacggcatttcactggtcagcacgcacttaaccgatatgccattggaacttatcaatagccgtcaaatcggtcattttgttgaattgacatacaagattaattattaaaaatcaaacgaaaaggcagccacaatattttgtcgctgccttttcagattaaagtacgggggaatgaccaatgaaagccaaccttaaaatcccacttattttattcatcgctttatgtatcagcggcctctgccagctgttgcaccaagatttcttcgctgtgcttgtgatgctcatcgcaacaatcagttgtctgataattgcctttaaaaaccggcaagctagcggacgttaattcgcaacgcgctcataatcacgagcgtctgttctgtgctgatggtcgccccacgtaataattcgagcgtgaaagtcgctttttcgaattgattctgactgatatcgagattcttcaaattcgtgccagtcatatccatgccgttcaaacgattcccgatcattgttagccactgccaatcaacttgcccgagtgagacttcttgcatactgcaatctttaaagtcgacatgccgcatccgcgcaaagttaaagccggtgtaatccgcttggcaagtgtcgaacgtgacatcattcagaccagcctctgcaaaatcggaaccaatcaactggcaaccattaaacgcgactcgttggaagggatcattcgtcaacgaacagtttaacaacgcgcagtgttcgaattgcacatcttgaaaatcacagttattaaagtcgacttgttcaaactgacaatttttaaataaacagcctttaaagaataacatctcaacttcggtttgcttcaacgttagttcttcgaaaaacaaaccttcataagtctcatctggttcaaacgcagtaagctgtaccgtctcaagttgtggatttagccgcggtgcctgtgctttcttatctgtcatctaactgtctcctgtctattgtgattagtataccgaaaattgtcgccagtgacgacctgaaattcaggaaagccttttcttttcattaatggtactttgtggtaggttaaaagcatcaaataaaaggagtgattgatagtgcaaaaaatcaatgttggtggcagcggcttaatggcttcgccaattgtctggggtgtcatgcgcatcccacaactgagcgaccaagaagccctgacaatgctcgaaaccgcctatgaacatggaattaattactttgataacgctgatatttacggcgatggtgcttccgaaattaaattcgggaacgcccttaaggccagtcatattgaccgtgatcaagtgctcgttcaaaccaaagtcggcattggcaaaaaaatgtacgacttttcaaaggaacacatcatcgaaggtgttgaagccagcctcaaccgattacaacttgatcatgttgacaccttactgctccaccgacctgatccactcatggaaccggatgaaatcgctgaagccttcttaaaattgcaaaatagtggtaaagtccgccaattcggggtcagcaacttcaatcccggtcaagtcgacttactccaacaagcagtgccgcaagcattgattgctaatcaactccaattcagtttgatgcacactggtatgattgatgccggcgtgcataccaatatgcaagacgcgcgcagcattcatcacgatggtggtttattagaatactcacgcctcacgaatatgaccattcaagcatggagtccttatcaatacggcatgtttgaaggggtcttcatcgataatccgaaatttccagaattaaacgcagcactccaatcagttgccaaggcacatgacaccaacgtcaacgcaattgctagcgcatggctcctcagaattccagccagcatgcaagtcgttgtcggcacaatgaaccccggccgcctagcacaaatctgcgaagcagacaaagtcaccctcaccagaagagaatggtacgacctatacttggcagcaggcaatgacctgccataaagtgctgagatagccgtttatcacttgaagattagcctatcaccaggaattatggtggtttccggccatgatttttgttgtgtagtgaaccggaaggttatggctatcgaagcatgtttaaagtacgtttaaaacggttagtttctaagtaagtagtaattgtgcattaagcaaaaaaagcgccgtctcaattaatcttgagacggcgctttttttggttctacttaattctgataaggattgcctgcatactgatccaccaccgccatcgatccatcgtaatggccgcgaccggttgcatagtcaaattgcatcttaggttgtacattccaaacatacgcattaaagttcaacttcttatctgttgagattgcttgaacccagtaaccgcggggcatcaattcatctccacggaacacagttgtcacttggtaaatcacctttttattttgcgttagtgcttggcgaacctggtcttcaaaaatctgcatggtacgttgattgctgaagaccgtttgtgtcgctaagttcttcggattattgctactgccgagttcccctttttggaaaacaccatctcggttgaaattaaacgaaatcgcgtatgcaatcaaatggccgcgactttcaggaaagacccgttggccatcaatcatcacgggttgattatgccagccggttggttgccacgtttgacgatggcgtgtgtttgaacggcctaacgtctctttcgataagaaagccgtattagtcgttgtccgatttaaaccatccaacgcaccatacttgatccgttcggtttgccattgacggacatccaacgttgatttattatggttcacttctaaataggcattgtcgcctgacttaaaggtcttctcagccaagattgccgttgtttttttaacttgttttttatttgcaattgttggtgcattctcgtgcgttggttgactagattgtgtcgcctgacagccacccaacgccaacatggtcaacgataagccgaccaataaatactttttaaacatcctgttcctccctattcttacctgcttcacgacgcttcagttggtgcattgtcttgaaataggaactcaatagcaccaaacatgaaccaatccaagcgagtgggttggctaaacttgcgcccatgaagccgaattgctgcacgaggaagatcccggcaaaaatccgcatgaacaactccgcaatccccgctaaggttggaataaagctctgccccaaaccttgcaaggtgtagcgaatggcaaataagattgccaaaataaagtaacaactactgttaaagcggaagtagatttgtgctaaatccgtcacgtgcggttgattgttcccgataaacaggttaaccagtggtcgtccaaaggcaatgatcaacgcgcccatcactaaactaaagatgattgacaccattagtgtctggcggacccctttactgattcgtccaaattcacgtgcaccgtaattttgtgcggaatatgtcgccaaggtaatcccaaatgaattcccaacttgagttgctaattgatcaatcttcccagccgctgtgtaagcagcaaccgcgctagcacccaatgtattcaacatgatttggatcacgattgagccaattgcaataattgacgattgaaagcccatcggtaatccaaccttgagatgatccatgacatctttgcgcgtcacgcgaaaatccttcggccgtaaaacgaggaccggaatgcggcgataaatatatagtaagcataacacagccgcaattatttgtgcagagaccgtcgcaaacccggccccttcaacgcccatatgaaagcctaaaataaaaataaaatctaacacaatattcacaatgaccccaattactaagaaaaagaggggggttcgactatccccaagtgcgcgaatgatattcgaaagtaagttaaacgccatcgaggcaaaaatcccaccaaagataatcataataaaccgttgagcatcaacaatgatgctggccggcgtcttcatcatgaccaaaatatgtcgagcaaataatagactaataactgtcaaaatgatggttatcaccaaactaatcagaatgctcgtcgcaaagctgcgcttaacgccgcgatagtcttgagcaccatagcgttgggctgtcaagatggacaacccagccgtggtccctgtacaaaaaccgataatcagcatgttcaatccacccgttgagccaactgctgctaacgcattaacaccaattgtccgcccaacgattaaggtatcgatgacactatagagttgctgaaaaatattcccaatcaataatgggccggtaaataagataattaatttcaacggattacctttagttaaatcatgcatatcaattctcctttgctccatgttgataacttctcaaattacacaccaaaaacagcgtttacatctgtcttaaattgaattaagtctctcatattcaactttaaagtaccatcaaaaagcatctattatcccactatattagtctataaaaaaacagttaaacaagtcattcagcgacttgtttaactgtttttttaatttgaataggattagttaaagtaattaatccccattgcatcccgcacttctttaagggtttgttctgcaacagcattggccttcttgctaccttcttctaacatcttataaacggcttctggattcttttcaaattcagcacgacgttcacgaatgggtgcgaacttcgcttgtaagacttcgttcaagtaacgtttgatcttcacatcacccaaaccaccagcttgatattgcgctttgagttcagccactttttcacgatcatcatcgaaggcatctaaataggtaaagactgtgttgccttcaatgtgaccaggatcggttactttgatatgcaatggatcagtgtacattgacatcactttcttttcaagcgtttgggcatcgtctgataggtaaatcgcattgcctaatgacttactcatcttggcgttcccatctaaaccaggtaggcgtccttcgccttttggtgggaagaccccttctggttcaactaaaatttcttgtccgtaaacgttgttaaacgtccgtacgatttcacgggtttgttccaacattggttcttgatcatcaccaacaggaaccgtcgttgctttgaacgccgtgatatcagcagcttggctgactggataaattaaaaagcccgctggaatactttgttcaaaattcttttgttggatttcagctttcactgtggggttccgttgtaaacgcgaaaccgtcacaaggttcaaataatgcatcgttaattcgctcaaagcaggaatttgtgattgcacgaagacggttgttttagcgggatcaatcccaactgataaataatccaaagccacttgaaaaagactgttccggattttttcaggatcacgcgcattatcggttaaagcttgttgatcggcaatcatgataaatgtttcgtattcgcctgaatcttgcatcgctacccggttgcgtaatgaaccaatgtaatgcccaatgtgtaatttaccggttggtcgatcgccggttaagataatttttttgttcataataataccctccaatttaatttatcaactcaaaaaaagcgccctaattgtgattaaacaattaggacgcttctacgtggtaccacctaaattgcacgaaaatcatccgtgccactcacgcgataagggtgctacccgaattagttactcactaattcccgattgaaggcccaattcacaaccaacttcttgacgacttctcagtcccgccgcttcctgttcaagaaaatatcagttgctacttatccttcactttgtctgttgaattactgtcatactaacggattttaaaatgaatgtcaatcggtcgcttttttaccccaagacgcttataatataacaactaacaattggaggctgctatgttacacgaagacacaaaacaacaagaacaagcgcgcgttgaccgcacagttatacaggtcgaccaacgcctcacagtgattaaccaacaattggccaacgcctacaatgaaaccaaagacatcgaacaacgttacggcgacaatacgaaagtcaacattaccgaagtcgatgaccgcatggaaaccaacgccgcggtccaacaacaaaagcaattggtcgccgccgctgtcgaaaacgaaaaattactgactagccaacaagaacgcctgaccgatctcgtcaactccccttacttcggtcggattgacatcaccgaagatggtgaaacggaatcactctacatcgggaccgccacttttatcgacgaccaagacaatttcttaatctacgactggcgcgcccctgtttcgagtatctactataatgggacactcggtccagtgacttatgagacgccaaatggccctgtcaaagttgacctcaaactcaaacgccaattcaagattcaaaacggtcaaatcgaacacgtctttgatacgaacgaaactgtcggcgatgaactcttacaagccgtcctcggtgaacaaagtgacgaatacatgcaaaacatcgttgccacgattcaaaaagaacaaaatgatatcattcgcgatacaaccgctgacttactgattgtccaaggagtcgccggtagtggtaaaacctcagctgtcttgcaacgcatcgcctttttactctatcacagccgcagtcagctcgaagccgaccaaatggtgctcttctcacccaaccgtttattcagccattatatttcagaagtcctgcctagtttaggcgagaaaaacatgcgccaagtgacgatggccgagttcttaagtcatcgcttctcaggcttacaggttgagaacctcttcgaccgcttcgaaaaagatcaagccagttttcctgaaatgacacaagccatgcgccggtataaagaaagcacagcgttcatgcacgcaattgaagcttacgttaaacaagcctcaacccaaccgttggcattcaacgatctatacttcgaagaccgcccattttttactaaagaccagatgaatcagatttatctcgcgctccccgcaaatatgttacccggcgacaaattcctcgccactaaaaacacgctcatcaaacggcttaaacgccaaatcaacctcgaagttcatctcgactgggtcgctgaaaaaatcgataccttaaccgatgatgcttaccggacgattgtcggtgaccgcgaattcgattctggcgatgatgaacaagctttcatcgctcgtgaaatcgttcaaagttatttcgccccactctatgaatcaatctacaatgattatttcctagatgaatccacagaatatcaacacttcttaagtggtgcttgccctgccgacatccctacgaaggtttgggacgccatgattcgccaagtcgcggataacaatgaacgccacatcgtcgggctcagtgacgccgccccaattctatacctgcgcgacttattaactgacagcggccaaaatcacggcattcagtacctcttcatcgatgaaatgcaggattacagcatcgctcagttcgtctacatccaccacgcctttcccaacgcgaaattaaccgtgctcggcgattacgcacaggatgtcttcacggcgacctaccaaaccggccacttcatcgatcaactgaccgctgcttttccccgcttaaaaatcaaccaaattagcttaaccaagagttaccgcgcgaccgccccaatcaccaacttcgccaaggcactcttgccaaaagaaacagccctccaagccttcagccgtgacgggcgcctaccgcgcgtcattgagacgccaaacgaccaagcgctcgctacactgacccaagaaatccgccatctccaggcagaacacgcgaccgttgcgatcctcaccaagaaccaacaagttgcccaccaactctacgctagtttaacacctgatgaacacgtcacactcatcggtgaaacaacccgtagtttacccaaaggcatcctaatccttccattatacttagccaaagggctcgagttcgacgctgtgattggctacgacatctctaagaagaccttcggcgcacaatcagacgtagatctcctctacacactcgtcacacgtgctatgcacgatttaacactgattggcgtggatcagctcagtccgttgatagtggcactgccgacggacatctatactaccttacaatcaactaagcaatccatttaagcaaaaaagcctgtcgaaattatcgacaggctttttgaattcgtattttatgcaccgtatggaaaatccaaaccagggactgcatttaaacttagatcagcaaattgttgtttttgtaattcgatatgcgctgcggccccgatcatggcgccgttatcgccgcataatcgaagtggtggcatgatgaggtctaaatccattccggatgccttaatggctgtcgccaaaccttcacgtaaaccttgattggcagccaccccaccggccacaacgagttggcgcacgtttaattgacgcgcggcgtgcatcgttttagtggtgagcacttcgaccacactcgcttggaaactagcggctaagtcttcgtggttcagcgtctcaccgatttgatcggcatggtgcactgtgttaatgaaggcactcttcaaaccactaaagctgaagtcaagattatcttccttgagcatcgcacgcgggaatttaaatgtatcttgacctaagtgggcaagccgatcgatttctttaccagctgggtattgaatcccgaggacgcgaccaattttatcgtaggcttcacctgctgcgtcatcccgtgtatcaccgataatttcgaattcgccggcggctggcatgtacaccaattcagtatggccacctgaaaccagtaaagctaacaatgggtattctaaaggcttaacaaaccgcgccgcataaatatgccccgccatatgattgactggaatcaatggtaagtggtgtgcgtaagcaatcgctttggcagctgtcacgccaattaataaggcgccgactaatccaggcccataagtgactgcgaccgccgttaaatcagcgtaagtaaccccggcctcttctaaagccgcttgtgtacaaactgtgatttgttcaacgtgatggcgactggccacttcgggtaccaccccaccaaaacgttgatgactcttaatttgggtagcaatgatgttgcttaaaataacatgaccgtcttcgatgacggccacactcgtttcatcacaactggattcaaatgctaaaattaattctcgtttttccgacatgactgactcctattgactcaatatccgacacatactgaatgcatcttctttttcctgaatgtaataattgggacgcgtccgcaccactgtaaaacccaatcgctgataaacggcttgagcgcttgtgttgctggcgcgtacttctagtgtaattttttgactgggataatcgtgggctaaactaaccatttcgtgcaccaaaaagtggccaataccacgtttttgataacttggccgcaccgcgatattcgtaatatgagcttcattggttgaaaaccatgcaccgacaaacgctacgacttcagtcccttggcataaaaccagatacaacgatgtcttgcgcttgctcaactcactagtgaaggtccaacgatcccacggcgtctgaccggcatagaccgaccgttcaatgtccaacaatgccgtaatatcattttgactcgcgcgtgctaagtaaaatgtcgtctcatcaatttcaacgcgccgagttgtgtaaggcatttctttcttgacccaaatctggggtttgaggtattccctaaacttgttccacatacgaatcagcgcctcgctcatcatgcgtttttgcccagttaacttctgcttccgtcttgcgtaaataaacgggtccgaagccatggatatccgcgacaggttcagccatcaagcctaattcacccaagacgctggcgtgcggtaaattatggttggcggacacgaaatgcgcgttactacctaatgcagcttgaatctgttcgttaaagtgtgcaacgtcattccccacaaaataaacaggttctgccaataattgtaattgtgccagtagtgcttctagtgaaacgtgttgatcggccacaacggtttgcaatgtcccattttgccactgataaatccccgcgaaaacattgtcgcggcgtgcatcaaacagcggtacaatcaaggcggtcgtatccatcacattggccgctagcaatgctaaactcgaaatcccgaccaatgacttattaagcgtccaagcaaaagacttagccgttgtcaccgcaatccgcaatcccgtgtatgaacccggaccttctgcaacgacaaagcgatcgatatcttcaatggtggtttttgtttgttttaatagttgatcaatcattggaagtaacgtctgactatgtgtttgacgaatattaacagtcatttcgcctaaaatttgatgatcttcaaggagtgccacactcaccgcttgattcgaggtatccattgccaatagcttcattatttcatccttcttctgcttataatccttgttattctagcataaaaagccggtttccacaaaaaaaggcgttatcttcaaatagataacacctactcatttataatactctatcttttaatctaataatcggttcgaaatgcatcacgatgtatagaataatcggatgaatcactaatgtggcagcttccccaatggcccgcgccgtaaagtggaacccaaatggtgtatgactaataatcgacacccaccatgaattcaaaccgaggttaacgattagcacaactgtcacaacggcggcaatcacgcgccaccatgtaatcttttgtcggtagaagtaacacccatagatgaaagcccctagaaacgctgaaagtgtgaagcctgggaaataaccacctgggaccccaatcatcaaactattgatgaggtcgccaataacggcggcaagtcccgcccaaactgggccaaaccaccaccccattaaggcggtgacgatgaatccaaaactaattctgaaaatcgttagtgaaattgcaaagcgtgcaaccaccaattgtaaagcaattaaaacagctagtaaaacaacgcgtctagtgtctagcttaacaccaaaaatctgaccattaaccataaaaagcatctcccttttggagctgccacaaataatactgcggcgaatgcggtactgaaatcgcaagcattgctgcttttcgtctggtgtccacattccgttccaccagcacttaacgcttcagtcctactccgaatttttagaaccccttaaatgtatcactaacgttatttaattacaagcaattgattttcatttttcagcaactcttgcagaaaatttgctatacttacagatgagtaattcggatttaaagaaaggtgttcattaaacatgaagaaaattttagtcctccatactggtggcacaatcgcaatgtctgcggacgaagatggcgcggttgcacccacagatcaaaatccaatggccggctttgaaaagctgttcgataatcaattaatcattgaaagtgaagagttcgccaatcttccttcaccacacatcacacccgctgtgatgttaaaccttaagaatcgaattcaacaagctgaagaagacgggattgatggtgttgttgtcacacacgggacggataccctcgaagagaccgcctatttcttagacttgacacttcccaacaatatccccgtcgtcgtgactggtgcgatgcgctcgtcgaatgaaatcggcgcagacggattacacaacttgattagtgccgtttggacagccgcttctgacgatgctcatgataaaggtgtgctagtcgtgatgaacgatgagattcacacagcacggtatgtcacgaagacgcacacgacgaacgtcgcaacctttagaacgccaacttttggtcccatcggtttggtcagcaaacacaatgcgaatttcttccaagaattaattcgttctgaaatttgcgacatcaaaacccttgtcgaacctgtttatcttttaaaagcatacgctggcatggatgggactttattcgacgccatcaaccaacccaacaccaaagggctcgttatcgaagcactcggggctggtaacttaccaccagcaaccttacccgctgttcaagcgctattagatcgcaacatccccatcgtacttgtttctcgctgtttcaacgggattgccgaagacgtctacgattaccaaggcggcggtgtaaagcttaaacaaatgggcgtcaccttctgccaaggcctcaatggaccaaaagcacgcctcaaactacaagtcggcctcagcgcaggcaaaacaggcgcagcattaaaagaatttgtcagcaacgcaacatcatagagtgcgtcatcaacggttagcttctgagcacttgcctaacttagcgaattgacgctgtaagcgccgatttgataagtgtagcaaagcgcaggaagctgttgatgaaaacacgttttcgatagagtgcgtttgaaacggttagcttctgagcattaactggatttgccgaattggcgatgaaatcgccgatttggtaaattgggttaagcgcagggagctgtttcaaaaagcacgtttcaataaatattcgaagataacaaaagaaagcccatcacaactttatctgtgaatggggctttctttcgtttaaacgtgcttcctcgaactgccttttccggttaactgaataattgggattatggctaagacccgccataatcccaattatcccgttaatcctcaaagccaacccgttcgactcagcgctctttccacgtaatttccgcttctgctgcacttaggtcatccacggcgactttatgccgtgttgtgattatatcatcaactgtgagttgttcgaccatgctttgggtcatttgaccgtattgaatttcgtggccgtagcggatgttgacacttgctacgcggtgtgtcgtcaagaagtcataatcgagcgcatccaacatccattcaaaataatggacgttattaacgtgttgattaccatcaatatcgaaataacgcacacgatattctttggtcgtcacttgttcgggatcaatcttcttaatccgtgggaatcgtttgctacctttaatctcacttgactcgaatggtgccatgatttccggcacaacttgcaccatactccgtgtttcatacgacatcatcacgaagatgctttggacgaagacgcattcgttgccggcttcatcatataaccagaaattccggtaacagaaatacttgttgtaactctcagcttcagtcacaattttaactttttcatccaccttcggcatccgcgtaatcttcatttgatactgcgtgaccacccaaccaagattgagcgcatgcattgtcgcttcaccgacgttgagcgcattaagttgatgctctgatgctaaaattaaaatgttcaccaaggatgcaagcgttaattcgcccttgatatccgtttcgaaatacggaatttgatagttttctgaatattgctttcctggcatggcgtgacctctattctgttaattcgtggtaggcattataaacgacttgctttttcaagccatttgccttagcgaccgtcttaatcgccacgttggggcttgctccttgttgaatctgggcttccacttgttcaggaagggatagcgattccgttgcaactgcactgaccgttgcatctggtgctggatttccagcaactatcatcacaaattcaccacgtaattctgtttcagtcgcccaagcaagcacttcttctaggtcgccacgaatgaattcttcgaacttcttcgtgagttcgcgccccaaggtgactttacgatcggcgccaaacgtactaagcaaagcttgcaacgtctttttcaaacgatgcggtgcttcatagaagataagtgcttcaggcttttgtgccaacgtcgttacggcttccgttaactccttgcctttacgaggcaaaaaaccgtagaacgtaaacggttgtggtgtgatgcccgaagcaatcaacgctgtaatcccggcattggctccaggtaatggcaccactgaaatgcccgcttcaatacaagctttaacgagctcatgaccgggatcactaatcgatggcatccccgcatcactaacttgtgcaatatcgtcaccggcttctaatttttcaatcagcgtttcaatccgttgttgcgtattgtgttcgtggaaactaatttgtttcgtttcaatctcaaagtggttcaataacttctgcgtatttcgtgtatcttcagcagcaatcagtgcgaccgatttcaatgtatcgattgcccggtaagtcatatcgcctaagttcccgatgggggttggtactaaaaataaagttcccgtttccgtcgttttaaaacttgattgtgtttgcatgttctatcctttcaagatgcatcaataatgacataaagacaggccaaaagtaagcatcccttttgccctgccttttttaatcgtttgttcgttcgccgtagatgacatcattacaaaatgcgcaaggctcgttattttcgcgtcgtgacccataaaaatacgggcagatatggaagccttcttcgtaaagattctgtaagttttgttttgatttcgaaagggcttgagccccttccttacccgtttgcggggtggctgatggttccaattcttgcaaatgttcccgcaagtgcttgttttcaatctttaattcagcgtttttctcaaggacttcggcaaggactgctttcatttcactgagcccctcaaacgtcaatttagcttgctgttcaatgtctgataactgttcatataagtctttactcaccgttgatatcctcccgatacgctggttatgcgttttactatgcaattaactttaacgttaaactctctaagacgttttggcaactaatattttgttcaaaaatgcgttgtgcttgtaaagcatattccgtctgagcgaccaactgcgtggtagtcaacgcggcgctggcctggtttaactggctttcgtacgcaccaaaacaaggtgtggcgcctaattcatagcggtaattcaataaatcttgataccataagcccaccaaagttaaaaaggtcttctgctgttggcgatcaactaataatggtaaaatttgcgtctgaatctgcacaaatgcttctaaatcacgttgttcaactttttgtgcccacgcggcaagcttcgcactgacttgtaatagccaatcatccgccaataaggtctgtgcttcagttaagtcacttgtcaaatacaccaataactgcgcttgttgtggcaaaataccagctgcttcaaactgttgttgcaccatttgtggtgccaatgctgccagatcaatcacttgaagccgtgataaaatcgtggggagcatttgatttttattactcgtacataaaatcgcgtaaacattttgcgccggttcttccaagaacttcaacaaactattagccgcgctggcggttaacgtttcagcagcttcaataatgaataagcgttgactggattccatcccgctcttagccacttcttgtttcaaatagcgaatatcggcaatcttaatactcttaccttccggcttaatttcaatgacatccggatgattatgcgtcaaaatccgctgacattccggacatgtccgacaaggttgcccatctggtgtcacttgttgacagaacagacgcagtgccaaccactgtgccaattgtgtcttccccaatccctgtgcaccagctaatagataaccatgcgccatctgtccacgcgcgataatctgggcaaactgggccacaagtttgggttgaagctgttcaattgttaaactggccatcgattagaagcggtggaactgttcaatcggcatcacaaagacggttgccccaccgacttgcacttcaatcggatatgacattgagctatccatcgtggcatccatattaacaggcggtgtcatgaattgttcgcgtgcctgacacgttttttcaataatcttaagcgcttcaggaacccgttcgtcttcaattccgacgataaacgttgtattcccagattttaagaagccaccagtcgttgacaacttggttgcccgaatgttggcatcgattaattcgctgcttaataagttgctatctttatcttgaacaattgctaaaagtaatttcatttcaatctccccttttctatgctgtgaataagtctggatatcgttgttcaatcacttgcagacatttggcaacaactatgtctaagtctgcggtcgcatcaatcgtttgaatccgctctggattatcttgcgcaagttgtaagtaggattgccgaactttttggtgaaaagccaacttctcttggtccaatcgatcatattgatcctgtcgattctgtttaatccgttgtaaaccgacttcagatggtacatcaaggtataacgttaaatcgggcgctaatccattagtggcaaataagttcatttgcgcaacggcttcctcaccgatgccacgacctgccccttgataagcgattgaactatccacaaatcgatcacaaatcacgattttgttatcagccaacgctggttcaatcttttcaacaatgtgttgtcgccgagcggcagcgtataacagtgcttcggtgcggtcatccattgccgtattttcaacatctaaaatgacattgcgaatcttttcggcaatcggattgccacctggttcgcgcgtaacaatgatgtcttggttgcacttggattcaagtagcggtacaacagccatcaacgcacttgtcttaccagcaccatccggcccttcaaacgtaattaattttcctaccacaaaacaaccttcttcatccatagagttacttccattttacttgattcaacaaaagacgtaaagggaagagtgcgtatccggcggttatgttcttgcgtttagcgtgcgacagcagacgtttgaaacaaaaaaagacaaagtcactcgaccttgtcttcacgctgcggctgtcatctgaatgcccgcgctatctaaatgtatttctagttgctgcttctttcgaaactgcttcacctgctactttacgttggcgggcttggcggaataagaattcaaactttgcttgttgaatcttactttccatctctaattggtcatcgagtccgcggacgttgtcttgcgtcttttgggccatctgccacttatctttgacttggtacactaaatccaataaggcttgatcacctaattgttttaatgtcggtttttttctaccaaacatcgcaaacccaccattcttaaatttcttgacgcccttcaaccgcttttaacaacgtcatttcatctgcgtattcaatatcgctaccgactgataaaccgtgcgccaaacgcgtcactttaatcccagctggtttaatcaaccgcgaaatatacattgccgttgcttccccttccggtgttgcattagtagcaatgataacttctttagccggtgttttttgcaatcgtttaatcaagttggcgatgttaatatcatcgggtcccttgccttcaatcggtgataacaccccatgcaagacatggtagagcccatgataatcattcatccgttccatcgacatgacatctttcggttgttcaaccactaagatcatgtcttgactccgcgttgtatcgcgacaaatttcgcacgggtcttcatccgtaatgttgccacagacactacaataatgcagatcacgacgtgccgaaattaagttcttggcgaaattcgtcacatcgtcttcattcatatcaatcgtgtaaaaagctaatcgggttgcggtcttgttcccaatcccaggtaacttcatgtagctttcgatcagcttcgcaattggttctggatattgcatcaatgcacttccttaatgtctcacttaaaatgggaggcctttagtaaatttacccatttgggcttgtgtttgtttatcgatttcagtcatcgcttcgttagttgccatgataatgaggtcttgtaacatatcaacatcatctggatcgatggcctctggtttaatggcaatgtctttcatcttcttgtcgccagtcattgtgaccacgactaaatcgttggctgctttgccgacaaattctgtattgttgagggcttcttgtgtttgccccatttctttttgcatcttttgcatttgtttcatcataccttgcatattacccattccgcgcatcttcattacttcctttcaaatttaaacgttaatcttttttaacaaccaccgcatcgccaaacaaagcttgtgcttgttcgacaacggccggtttttcttctggtttcggcgttgcttctgcttcgtcatcagttgttacctgttgacttggtactgcgtgattctgtaaatattcctggcgaatttctggccaaacatcgtggggcactaaaaccaccttgaaggggttgccagtcaaacgattcaagccgttttctaaaatgttcaaaagatcttgatcattgctagctcgctcgaataaaatcgcgtagttaaacgcgacgacaacgccactttgactcgccgcaaccggttcggaaaccttcatcacggcgcgcttggtaacgtccaacatattcaacagatccggccagacttctttgagattctccaaattggtccgcgtcgcatctgccaataccggataaatcgccttacggttgacctttttactaatcttcttagcaggtttggcctttggcttggcagctggtgcactcactggtcccgccgcttccaatttttgtaacgccgcttgtaattgtgcaacttgttgactcaacgctgcgacttgttcattatcagcagctggtgcggcaaccatcgtagtcgttacttgggctgtctggacttgcgtcaagcggaccgttgcgacttccagatagatttctggatggttcgtgaaacgcaattgctgttgcgtttcattcaggatatcaatcaccccgtacaaacggtcagccggcatcgctgcactgagcgctttgaagtgttcatccaatagatccatttcacttgcggcgactaattcgggtgcttgttgatacaacagtaagtcgcgcacatattcaattaagtcttccacaaaacgttgggcatctttaccttcagccaaaatctgttgcaacaattgcaacgcttgtttaggcgcattatcctgaattgtttggacataatccgccaacaacgcttcggttaagctgcctgtcacatccaacgcattatccaacgtgacgtgattgtcgctaaaggataacacttgatcgagaatacttaaagcatcccgcatcccaccttcagcagctttggcaatcactttcagagctgctggatcataggtcatttccttttgatctaaaatataagccattcgcttaaataaatcagcggccgtgatccgcttaaaattaaagcgttgcgtccgcgaaatgatggttgctggcaccttgtgaacttccgttgttgcgaggatgaataccacatttgttggtggttcttccaacgtcttcaacagtgcattgaacgcaccagtggataacatgtggacttcatcaatgatgtaaattttataatcagcttgggtcggcgcatatttggccttatcccgaatatcacgaatctcttcgaccccattattagacgccgcatcaatttcaatcacatcattgagggcgccagccgtaatggcccgacatgtctcacattcattacatggttcgccatctttttgataatgacagttaattgccttggcaaaaatcttggcagccgatgttttccctgttccacgtgggcctgtaaataaataagcatgacttgtttggtgcgtcataatggcatttttcaatgtttgggtcattgtttcttgcccaatcacgtcatcgaaacgctgcgggcgccaaacccggtataaagcttgatagctcatttaatgacctccacctttgcaatttaaagtccgattcatttaaaactacttgttccattttagcatattttaccgtcaattttgattgcgttgcatgaaaaaagacccaaccgacaaaattaattgtccgttgggtctggttaattttcacaaaacttaagacacatgataaaacaaacttagtgctgctttcttccgaacctgacacgattcgtaggctcatcattgtctcaaggcctttcggcaattcctattctacctgattcaagcattaattaccagccattttcttttttttacggcgattttcgcgaatctttctaaaaaaagtctgcaataaactcgcacattcagcttctcgcaccccgccaaccacttcagcttggtgattgaaccgtttgtcagttaataaattcatcaacgtgccggtcacaccagccttaggatcactcgcgccaaaataaactttgggaatccggctattgataatcgcgcctgcacacattgggcatggttctaacgtgacataaatcgcggtatcttccagacgccaactcttttcaaccatacaggcttcttgaatcgcgagaatttcagcatgtaacgtcgcatcttgcgcgtgttcgcgaatgttatgcccccgtccaataatttgtccgtctttaacaatcacggcgccaatcggtacctcgccaatgatgcgtgcttggttagcttcatcgatggcggcttgcatccattgatcgatctcttgttgtgtttcactcacgcgttagtcgcccctttattttacttctcaactattaaaacacagtcgcgctagtcgagcaattaaaaatggtgccgacggattgtcgataccatttttaattgctccataagccatcctcttccgtttaactgcaaaatgagcattatggcaaggactgccataatgctcatttcactgttaatgctcaaagcctgaccaactcgagtcgcactctatagtttttctttcacctttgttgcgtaagccattagtgtttggcgcaaatcatccatcatatctggtagattgtctgcgtgttctccgagcttatcttttaattgggttaacctgtctgccgcagtcaacaagttattcacatccgcatcggagagttgatcgaccaactctaacgccttttgattaccatgtaatttgtcttttacaaaacttttaactgctaatcgtttgcgatagcgcgatactttatcgattactgccttagaaccgacaaaagcggtcgttgcgccaactgctgcagtcacccctacgccgattaaaattttatatctggttttcatcgtatcaacctccttgtactttaatcatagtttagcacaattcgcctgaatttaccgctttcaaccccggtccttactttaatttaatactttggagaatgtaataccccttatccttatgaataatttgcacgttgccaaaaatgctcatcatcgttttcttcgctgatggggcaccttgtttcttttggatcacaacgttcaattcaccatctggtaataagtgatcataggcaccagtcaaaatattttgcaccacatcttttcccgctctgattggtgggttggtgaagatggcggcgtattgatccgttacgttttgatattcagctgattcgaatacagtaacgttggtaatctgattcaattcactgttcttacgtgccaaatccaatgcccgttcattcacatcgaccatgtcgattcggcgctctggtgcgagcttagcaatcgtcatcccgattggcccgtatccacaccccatatcaagcactggaccagctggcgcttcactcagatcgaccgctgctagcaatgcccgtgaaccgtaatcaacagtgcttttagagaataccccgttatccgttgtaaatttaaaattaaagccgtgtaattcaaacgtccattgccgctcagcgtgttcaacgtctggatttttagaatagtaatactctgtcatcttttttcctcatttgtcgttagttatctgaaaatttcccaatttgaactgacttcatcaaacgacctagcaagccaccaggatgcggttgatccgcaacccgttgattaacgaccattaaaacttgaaccatcgtgaaaattaatgaggtccgtttttgataagcgatatatttcgaacgccattccgtcgtatatttcttcttataggtccgtaatccctggaatccgtagaagtgatagccgtattcatagatcagatgagcgattcgttcttcaataaagctaaactcggaagtccctacatttgcaagaggcgccatgccgaggttgaagtacgtgtagccatccgttcgattttgttcaaagagattaataaagatctcatccattataccagatggcgcgtcttgtctgtgacgcattagatcaatacttgcgacttctttggttcctgttggcatttcgttagcgaaagcaattaattggtgatcggcattatagacaactgcaattggggctttttggaggtatgcttcatcgaaaaagcctaacgagaagcctttttcaacgcgactacccaaccaatcatcagaaaccgctttgagttctgccattaattcggcactaaatggtgggtttaaaatttcaaattgatagccttcacgttcaaacttattcattaaggcgcgttcagcccgccgtttcttaccagtcatcgtgaagtccgccaaacggacgtagccttcttcaccaaacttgataaagtcaaacccgatttcatgcagttgcatcgttaattcacttgaaatttcgtagaacgctaaatgacaatcaatcaaatcagcgtcgtgcatcatctgttcaattgccggtaaaattttagccggatttccgactggttcacccattacaattaagcgatccgcttttttacgataaagcaagaatacctgatcttctccttcttcctgatagaaataaactgatttatcccgtaagtatgccaaatgactgacctcattgccgccgtaagtgttaatcacgttagcaattcgtgcttcatcatatggcgctgctattgaacggccccctcgactgagataacggtagacgagatataaggtccctgcggcaaccaacatcccgataaaaccagccaaccagactctttcggatggaaataaaagcgctgttggtacgggtttgcgatgccgtaagtgtggcgaattggcaatcccaacaaagccgtataacaagaaggcgcccacgaaaagtacaccatccacaatccgatcattccatgaaaattcgatccgttcacggtataattcgcgtttcaataagaaactagctacgagcacaaaagttaaaaagacagcgagtttgattgagaaatcccgccatagtgtattggtaatcgcaatcaccaatagcaccatcaacggccagaaaactttttgaacgcggttggcaacgccgcgggctaaggccaacatgacaaacgctacaatgatgtttgtcacacgatctaagaagaagaacgtgtatgggtagagctgtccaatcactgtgttggtaatcgcaaagttcgggacagttgctactaataatagaatgatgcttgaaatataaaggaagaaaacaatgaagtgatgagcgattttttgcatcacctgccgaggtaagccctgtaaataatgatttaaccggctgcctgcatcgtgagtaaataaaccaacgccgactaaaaacggcacgatgtaataaaagactcggtaaaatgacaaccagacaacggcgtccgcattttgaacgccgactgcactcagaccaaagatcatgaacaaatcaaacgttcctaagccccctggtaccatcgaaataacaccaatgatgttggcaatcatgaaaagtggtaagacttgtaataagtcacccttaatctctaagaaataaccaatcgttaagaaaaagccgcccgcaaaaccccattctaagaaagaccctaatgttaggcgtaaaacgcgttgcatcgaaagatctttgaaaaaggccgcatttttaaagcgcgtactaatcatcagaccagggaaatacaacgaaccgcccactagccataaccagtagttggcatacatcccaccaataccaaagccaaagatcaaaacgacactaatcagacaccagattgacaggccggctaataagaacagcgcaatttttgaaatcgcaattaagatttctttttgtgacgcttttttaccatagaaattggcccgtaaactcgcacctaagaagcccccgaatccggcaatgttcgtaaacgtattgacgatccaaccagatttgactttataccagaatgaatagtcctccggcagcaactccgcaatcacgaaatcataattgagcattggcaagaccgccacaaacccaatcaccagcatcgctagcaaggtccacggactttgtgtcgttaaactcgctttcaattgttccccgttcaagtcccggaaaatccggccgacttctaggataacaaagaccatcaccgaaaggatgaagatgccttttaacaacgttaggtgtcgctgaattccttcatatatgtgtttgccccattttcgcatatcaaccgctccttaacttaattaatttaattataagctatcccaaggcaaaacacagtaaaatgacaattatgttagatggctgttagattatgattttcgcttattacttacccggagcacaatccgattcccgttcacccgacaatcaatatcctctgattgcctttttagttctcaacagcaatggctgtcgcttaagatatggaatccatatttagcatcgtgttattttgtgcaactcgccatttatgttttacaaaaaaatatgtaaaaaaagaaccccacattagtggggttcttttagaaataaaacgtgctttcattaactgctttctgcgctttgctacatcagtcaaatcaccggctgattaggcaaatgctcaaaaataacccgttaatgacgcactttattttgaaacgtgccattggcgctagatttctgcgcttaactacaaatcgggcatcatggcttagatcgccgcgatgcccgattttaggttagtgctcaaaatctaaacaagcgccaagggcgctctatttaaattatttcaagttaacgacagcgccaacttcttctaatttagctttcatttcttctgcttcgtctttagcaacgtcttctttaagagctgaaggagcgttatcaactaagcccttagcatctttcaagcctaagcctgtgatttcacgaacggctttgataactttaaccttttcttggccgatttctgataattcaacagtaaagctgtctttttcagctgctgcgtctgcgccagctgcacctgctgctgctactggagctgctgcagaaacaccgaattcttcttcgattgctttaactaagtcgtttaattctaagattgatgattcttttaattgatcaacaattgcatttacgtctaatgccatttttgtttcctccattttgtgggtaatattttttgataacacttttaactacacaattttaaattatgcagctggttcgtctttgctgtcggcaactgctttaacagcatatgcgacattgcggactggtgcttgtaatacagaaagtaacattgataataaaccgtcgcgacttggtaatgtagccaaggcattgatttcatcaagtgttgccactttaccttcgatcataccacctttgatttcaagtgcatcagcactcttagcaaagttagcgatgatcttagctggtgcaacaacatcttcgttagaaaatgcaactgctgtagggcctgtgaatgtatcatccaaaccttcgtaaccagctttgtctgctgcacgacgcaagtaagtgtttttaacaacttccatttgtacgccagcttcacgtaattgtttacgtaattcagttacttgttctactgttaagccacggtaatccataacgacgatagaaacagcactattgaatttttcaacaactgtgtcaacaatttgtgctttttttgcaatgattgtttcgctcaattgattcacctccattagatttgtaaaacttgtggtcaagagttccttataaaaataaaaaactccatgtccaccaagacatagagagggatttcaacgtatcttcctcggcaggatattaagcctattggcacctgagtcttcggtagcataaataaccaactacaaatatagcatggattccataaagcgtcaatcattatcggcacttaattttagttatcctagcattacgttttacttattttatttttctgaaaaaacggtttaaaattgagactatcaagaaaattaatcgtaagaggtgcagttttttgaataatattttagtcgttaacgcgggtagttcatcattgaaatggcaactattccaacaatctgatttaaccttactggcaagcgggctcatggaacgcatgaacacaccagaagctagcttcaccttcaagttccaaggtcaaaaagaacaagtcgccattgctaatctttcctatgaagatggtgttcttcgacttttgaaacaacttgaagacaatggcatcattcattcacccgcagacatcattgcagtcggccaccgggtcgttgccggtgctaccacgttcgaaaaaccaaccattattgatcgcaccaacttagatacattaaaacaactcgacaagtatgcacctttacacaatcccgtgcaagttgactgcattgaaaccttgatgcatattttaccaactaatgtccctcaagtggctgtctttgatagtcaattctatctcgatatgccagatgaaactagtttttatggcttaccttatgaatacagccaagactatcaaatccgcaagtatggcgaacacggcattagtcacagctatatcttacaagcaacagctgactttttgaaagaacccgttgccgatttaaaattaattacacttcatttgggtggcggttcttcaattacggccagccaaaatggtaagcctgtcgatacatcaatgggcttcacaccgttagaaggcgttccaatgggcactcgtgctggttcattagatgcggccatcgtcccattcttaatgaacgaattggataagagtgccgatgacgtcatcacgcttttgaacgccaaatcagggattctcggcgtttcaggcgtttccgctgacatgcgcgatattcaatcaacacgcgctaccaatccacgggctaaactcgcctacgacatgttcatcacttctgctgtgaagttcatcgcgagctaccacgttgaactcggtggtgcgaacgtcatcactttcacagccggcatcggtgaaaacgacgcccgtttacgtgctgatatctgtgccaagctggctgttttaggcgttcaaatcgatcttgaattgaacgaaaacggctcaggtgcccgtcaaatcagtacccccgattcaactatcaaagtcttgatgatcccaaccaacgaagaattagcgattgctaatcacgtcctagcaaccatctaaattaatcgcgaattatgagagagccattagcgtttttcacgctaatggctcttttttgataaaataaaccctttttatcaccaaatcacgaacgatatttacaaaataataaatatttttcacatttttcttaaaaacacgattgttttgttgtacaataatgccaaggttcttaaaatactaattcagaggtgcataatggataaaaatattgatattgcaacagaatcacgaacgaactggttcgaacgtcaattcaaaattaaggcaagtgggtcgaccattaaaaccgaaatcatcgccggaattaccacttttattgcgatgtcatacattttattcgtcaacccaactatattaggcgacgccggcctagataagggggccgtctttgtcgccaccgcattaactggagtggtcggctgtttagccatggccttcatcgccaactacccaatcgccgttgcacccggactcggcagcaatgctttcttcgcctattccgtcgttttaggcatgggaattccttggcaaacagcacttgccggtgttttcgtcgcttccctccttttcatgcttgtcacggtcttaaaagtccgcgaagtcgtgattaacgcgattcccgctaatttaaaagccgccatggccgtcgggattgggttattcatcgcctttaccggattaaaacaagggggcatcgtcgtcagtagtgctaaatcattcgtcaccattacgagttggtcagatccgcacgtttggttgaccgtcttcggtttaatcgtcaccgttgctctattagcccgcaaagtccctggcgctttattcatcggtttggcggccacagccaccatgggagtcgtgactggtctaatcgcaatgcctcacagcatcatcgcttcaattccaagcttagcacccactttcggtgtctcaatcatgaacatccacaacgtcttcaatgttcaaatggccgtcgtaattctcgtctttttcttcagcgtcttcttcgatacaactggaacggtaatcggacttgctcaacaagctggtttcatcaaggacaacaagatgcctaagtaagtcggcaaagcccttttcgccgattcaacctcaatgattgccggttccgttttcggttcaaccccaactgcttgttacatcgaatcatcaactgggattgctgctgggggtcggactggtttcaccgccgtggtcgtcgccatcatgttcgtcttaagcttattcttctcacctttactggccgttgtgacgtcgcaagtgactgccccaatcttaatcatcgtgggctcattcatgatgaagtcaattgccaacatcgactggtcagaattcgaaacttcttttgcagccttcatgattgttctgtgcgtcccattaacctataatatctcatacggtttagcattcgggctgatcacttaccccatcaccatgattgctgctggcaaaggtaaaaaagtgcatccgattatgtatgtcgctgcgctcttattcctattattactcttcacaatgcacgaattacctgctaaataaaggagattactcatggataaaccaactttaaaacaactaattgatcaagctgccggccgtcaagctgccgacatggtcattaaaaatgcaaaggtcgtcgatgtctataatggccgcattattgaaggcacactcgcaattggtaatggtcgcttcctcggtatcagcgacgactaccttgcaccaaaagttatcgatgcacgcggccaatatgttgtgccaggtttgattgatccgcatattcatatcgaatctgccaatgtctcacccgctgtcttcggatcacttgtaacaccacatggcacaacgacgatcttggccgacccacacgaaatcgtgaacgtcgctggcatgcggggcttgaatacatggtcgcatctgccaaaaagacagcacttgatatcaagtacaccatgccctcgtgtgtgcctgctgctaatccaaacctcgaaacatctggtgctgtaattaccgctgatgagattcaacaatcttatgaccaaggcctcacttacggccttgccgaattcatgaattatcccggtgttgtcaatgctgatgatggcgttttagacgaattactcgtttcactcaacgcaaataaactcatcgacggccactcacccgctttaaaagaacaaggcttaaacgcatacgccgctgctggtattcgtaacgatcacgaatgtacccaagtcgatgaaatgctcgatcgcatcagtcgcggtatgtatgtttatctccgctacggcaccgtctctaagaatatgccaacccttttgaaaggcgtgacgccgcaaaacgcacgtttctgttgtctctgcggtgacgacttacaatccgtaaccctccgtgaaactggccacttggatgaaagtatccgcgttgctatcgcaaacgggatcgaccccatcatggcaatccaaatggccaccatcaacactgcccaatgtaccggcttagctgaccgcggcgggattgcacctggtttgaaggccaatttcctattggttgatgctctcgaacaattcagtgtgaatcaaaccttcatcgatggtcaaaaagttgctgccagcggcgaatacctactaacaactgaagattcagttactggttttgatgacttgttacaaaccgtacacctcgatacattcaccgctcaccaattaaaactcaacctcacaagcgataaaacccacgtgatcggcttacaaagcatcagtcggacgcaaaatctcgtcttaccggtcgctcacactgcagacggtgatttccaatatcatcctgacgaagacatcgctaaagtggccgtagttgaacgacatcatctcactggtaatgtcggcgttggcctgcttaacggcaacggtgcgattgccaccagcatcggccacgatagtcacaacctcgtagtagtcggcaccaacgacactgacatagtcgttgccatcgaagcgctcaaagaaagccaaggcggtggcgttgctgttcaggatggccaaatcatcgcgacattaccatttgtcatcggcggcttaatgagtaacgaacccatcgacactttaattgaacatcaaaaggccttcaatgctatttgccacgataaactccacgtcaccgctcacttcgatccgactatgaagctcggcgcaatgccactcgacgtcatcccgaacttgcggattactgacaaaggtttagtggatgtcacaaaattcgaaattatcgacattaatgcttaattatagcaacaaaaaaagcgctcatcctttcggatgagcgctttttgcattaccaacttagaagctagcaacgtcaactttgacaccagggccaaatgttgagctaactgataaacttgtaatgtattgacctttagctgaagcaggacgagctttgataatcacgtcttgcatcgctttaaagttttctactaatttagcagcatcgaatgataccttaccgattggtgcgtgaacgataccagctttatcaacacggtatgccacttgaccagctttaatgtcgttaactgctttagtaacgtccattgtaactgtaccagtcttagggttaggcattaagcctttaggtcccaagacacggcctaaacgacctacttgagccatcattggtggtgtagcaacggcaacgtcaaagtctaaccagccgccttggatcttttcaactaaatcttctgcgccgacaacgtcagcaccagcagcttcagcttgttttgcttgttcgccttgagcgaaaacaatcacgcgttgtgtcttacctgtaccatttggtagtacgacagcaccacgaatttgttgatctgcttgtttaggatcaacgtttaaacgatatgcaacttcaagagatgcatcgaattttgcaaaatcaactttctttactaagtcgattgcttcttcaacagtgtatgctttagtagcatcaacttgttttgcagcttctaaataatttttaccttttttagccattagggttttcctccttgcaattgtggtgaacggtttttgacctcccacttgatttttcaactttcattgaaaatccgactgaaagtgtcaagcatgaattaaccttcgacagtgaatcccatgcttcttgcagtaccttcaaccatgcgcatagcagcttcaacgtctgcagcgtttaggtcttgcattttagtttcagcgatttcttgcacttgagctttagttacagttgcaaccttcttagtgtttggttcgccagaacctttttgaacaccggcagctttcttcaagagaactgctgctggtggtgtctttgttacaaagtcgaatgaacgatcttcataaacagtgatcacaactggaattaataaaccagcttggtcagctgtacgagcgttaaagtcctttgtaaagcccataatgttgataccagcttgacctaaagctggacctactggtggtgctggagttgctttacctgcaggaatttgaagtttaacgatgtttgctacttttttagccacgaaacatacctccttaagtccgtgatgtggttaagatggccattatatttggtctcccactagtgtatgaaaacataccttaataatataccaagcaattgccgaaaaagcaaggcgattccattaatcgcgccacaagaaatcatcaatggcttgatcaactaaacgattttcgtgcaacatgctatgtgctccacccggtccacgaactaacatctcctggtaatggcgcacgtgtccttttaataggctacgcaatgcaaaactactatcgactgctaccgaaccatcgtgtcgattagttcctagtaactcgccagcaatgtttaagacactgatcgcagttggaaaatacttggcccgcacggctaaataattataattacgtgttcgtttaactggtccacgactggttaactcgctccaaaaaacaagtggtgtatccggaccaattgatggatcattaactggcgctgccaacaatatcactttgtccaccacggcatggtctgatgtcaacaaataacgcaacaccgtaattgcgcccatcgaatgccctactaaattaacttgcgtaacgccatacgcttcttttaagtgttcaataatcgcagctaaccaacggacttgatcttgcacatcggcgcggttattagcaaataagacttgaatcgttgggttattagcctgcaacgccgcgtctccatccacatgcaatcgaccgtttctgcccacccaaatgaccatgctcttcttagcaattccggctttttgtaggcgcccgagtaagtgaccgaatgaatagcgattcccccgatagccatgaatgaatagcgttggttgttttgtatataaacgtgcgcgcggccgccaatgtgccgaaacccggattaatttgtaaaaatccagtcctgccagtaagactaacaaaaaaatgactaagcccactgcaattaatatttgatcaatgatataccacatcgtcatcacatcattctttcgaaatagacactattgattgttcaaaaaaagcggctgagacaaatcatctttcgtctcagccgcctatcttgttggggcttgggacaaatcctagccccctactttaattgttgaaacatgctttttgaaattgactcttgcacttaactacatttgtcaaatcggcgcttgcagcaccaattcgccaaattaggttaatgctcagagtcaatccgtttcaaacgcactcttttttcgaaacgtgctccttcagtcatcccgactgaagtcgcactctaaactagttcgtctacttggtcgtagtctaattctgttgctgtttcacgaccgaacatgtcgatattaacctttaatttcatcttttcgtcgtcaacttctgtaatttgaccgacaaggccagcaaaggccccttcgataatcttcacagattcgccgactttgaactcaacatccaaatgacgagtgctcatgccaagttgacgcaagatttgtgtgatttcatcatctaataatggggctggtttgctacctgcaccgtgtgaaccaacgaagcccgtcacacctggtgtattccgcacaacgaaccaagcttcgtctgacatcaccatttcaaccaaaacatagcctgggaaagtcttcttcatgtcgactttgtccttaccgtttttgatttcatgttcttcttcttcaggcaccacaacgcggaaaacattgttctccatccccattgattgggcacgcgattccaagtttgccttcactttattttcgtaacctgaatatgtgtgtaagacataccagcttttttcgattgattcaaccatgtgcgttctccttttaaataccaaaataaaaaaactccgaccacgcgaagttttttgcttgccattagtatagcaaatccgacttaattaagccagttctaaaagataaataattgtagtacttttaagattgcaaaatcaacaacgccaaagaaaatggcgaataaaacggaggtcatgacgactgttgatgtatctttacgtgtttgtttggcatctggccaactaacagttttcatttcctgaccaacactcttaaaaaacttaatcatcttatttcctcctaattagcgcgtttctttgtgttgtgagtattgcccacaatgtttacagaatttgtttaactctagacgttctgtccgattcttgttctcagcaacatagtagttacgtgagccacagacagtacaggctaaggcgactttcttaacacccatatgaaaagcccctctctaattgacgtttatcccatttactttatcatgtgttgaccaaactgtcaatgtggtggattatccccaccaggtcgtgcggacaatcgctaataacaagctgacaatcaagctaatattgatcgccatcgcattttgaatcgcggtaataaaggtgacatccttcagttgccgtgtattaaaccggcgattattgcgcaaaatgacaggaatcaataataacaatagtaacgattcaatcggtaagaccttcgtaatcactgccacaacaacggccactagtgagaaccaaatcaacgtattatacaaccgcaacgcccaggttgttcctaaataatgcggcagtgtataacgttcattgcgccgatcttgatctagatcacagatattatccgccaacataatgttcgaagtggggattgcaataatcacaccgattaggcatagactaagcaatgttggtaattgacctttaagggtaaacgttggccaatcaaaatggagcgccatgatgctgtcgcttggtacgttgacatagaccatgataaaaaatgcaccaaatgattctgtcacaccactcaacaattcaccaaccggcatccgcgatagcggaactggcccgaacgtgtaaaagacggccacaaaaatacaggcgccaccgattaatagtaataaaatgttcgtttgccaaaccaaccaaattccagccgccatgctgaacaataaaaaatagagcattaaatgcagtgccttggttggcgacaaatgtttgcgcccaatgatattcgtctgtgcccgataatccagatcaactgctttgtagtaatccatcacattattaaagccagtcacaaataatacaatcgaaaactgggcgacaaaataaacaattgtcgtcactggattcagctggccattaacgtaccaacaataaacaatccctaagattaagggcaagacactcgccgtcttgacctcaatccggacaaattctaaaaacgttttaaaagacatctcggacttccttccattaaaaaagctaggacaaattgacttgtcctagcttcatcgtaccttctagcagacagttacccattaattcattggcagctgactgccgaagtcccgttttattcaccgtaaacgatgttatcaactgtaatcgttgctgtatttcctttttgtgcagcattgactaattgttcagcatagttgacgaagctgtgtgatgattctgttgcaccagaaacaacatctactttgcctggttcttgtgctttgacgaattcagaattcaacttagcgatgtattccttaggatcagtcttagcaatcttcttcatttgtttgttgtatgcagcatcgtcagcttttgacttgccatctttattgatgttatcgaatttagattcagtgattttaccgtctttaaccaccattgtgaaaactgttcgatagtcatggctgtaattcttttcttctaacttatatgtgccatcttgcatcttagcaccattgtcgatttcgattgtttcagtgttgccagcttgagcagcttgcactaattgttgtgcgtaattcttaaatgaatttgagctatgagttgcgcctgatacgacttcgatgcttgaaacatctgcacctttatctgtaaattctttgttcaacttaggaatatattctttaggatttgtttttgaaactttcttcattttttcgttgtatgtcttgtcatcttgttttgacttgccatctttatcaacgtaatcgtaagttgtctttgtcactttgccgccggcaacggtcattgacatcttaacgcgataattattttcgtagttcttttcttctaagttgtaagtgccgtcttttaattcaccgccggcaacttgtttcttagcggttgcttttttgcttgatgattctttgactgaactagattttgcctcttttgaagatgaatctttagcgttattactattaccacaagctgctaataccattgctgacattgcaacaactgataaactagctaatgctttacttaatttcataattttcccgcccttttcataaataatcatatagtttgtatcaaccttcacacaaagtcagtttatcttttttatgtaaaaagttcaagtcttttaaatcacttattttacggcgattaactttggttttacacaatttaaaacggtttccttaatagtcatcaatcccattaatcttatccgtgaataaatagacaatctttagtttattctgtataatggatactgattgaaaacgcatttatttcatttaggggtggctcatcatggctcaaaaaaacatcgtcatcatcggtgccggttttgccgggatctatgcgactaaaaaacttgcgaaatattacaagaagaatccagattatcaaattacattaatcgacaaacattcctactttacgtatttaacggaattacacgaagtagctgctaaccgcgtgccagaagaccacgttcaacacgatttgcaacatctcttctgtcgccgcaaaaacgttaagttggtgaccgatacggtaacccgcatcgatcaagcaaacaaaaccgtcattactgaacatggacgctacgcctatgatcaagttatgttggggattgggagtgaacctaacgactttggcacacctggggttgccgaacatggtttcactttaggttcatgggaacaggctgttgaattgaagcaacatattatcgatgttgttcgtcgtggggcaattgaacacgacccagaaaaacgccgggcccttttgaatatcgtggttgttggttctggctttaccggaactgaaactatcggcgaattacgcgactggcgtgatgaactagcagctgataacaagattgatcccgaagaaatccaatttacaatgatggaaatggcaccaaccatcatgaacatgctcgaccgcaacgatgcagccaaagcagaacgctacatggctaaacaaaaaattgatgttcgcaagaataccggtgttacaggtgttcacgaaatgcatgttgatttaaatgatggttcaactttcccaactgccactctaatctggacagctggtgtcaaagcttcctcacaagcggcacaatttggcctaacaaccggtaaagccggccgaatcgtgacaaacgaattcatgcaatctgttgacgatgacaagatttacgttgtcggcgatgtggctttcttcgatgaaactgatgacggccgcggtcaaccccaaattgttcaaggcgccgaagcatctgctgcaacagccctaaagaacatcatcgcaactgaagaaggtaaagcaacagtcccatacaaagggagctattccggcttcatggtttcaattggttctcgctatgcggttgccaacttgatgaatttcttccatctcagtgggttctttgccacattagttaaacatttagtcaacatgctctattttgttcagatttattctggctacgatttattccactattcaatgaatgagttcttcagaacgaagaacgatcgcaacttgatgcgcggtcatatttcacggtatggtaatgttttatggacagttcctgcgcgaattttcttaggcgcaatgtggcttgttgattgttgggacaaggttcaaggtgaaggttcttggttcaccaataagctccggttaccttttgactggcttcaaccagctgtcaccagcggtgcttctaaagcggcggatgcaacaagtgctgctagcggtgccgctgcaggcggggctgctgaaccagcaactgctaaagtcacattcggcctttcttacttattcggtcatgatccaatgcccgtcttcgataagatgccccactggttctacagcatcacgaaggtcttgattccaaaccaagaagtcgccttcttcatgcaaaaaacaatgaccatcattgaaattttaattggcttagctttaattgctggtctcttcacttggttaacgagcgcagtaaccgttgcaatggttatcacattctgcctttcagggatgttctattgggttaacatttggattattccaatggccctcgcctgcatgaacggttcaggccgtgccttcggattagataaatgggttgttccatatttacaaaaacatctcggtcactggcgctacggccaacaacgtgcactatacaaaaatcaatgagtgcgtttgaaacggtttgactttaagcattagcacagggaagcgaattagcgacatagtcgatgatttgattcacagcgctaaacgcagaaagttaacttcaaagcacgttataaaactgagtgcatcaaaagcgtttattctatgcggattagcaaaattagacgaataactagcgtagctagttgtttggctaatagtgctaaacgcaatagaatgcttttgaaagcacattataaaagcaattcacagctatcaaaaggagggggttatgacagacaggcttttgtcataaccccttttattgctattttagagagaaagactgacgcctatgtttaaacaaattcgcgctaaccgttacatcaaaatgattcgccctggtgatataatagtagtcatcggcctgtttattctatcgtttgccccagttgctgtttttagttggcacgaatggcaaacgacgcaagcagcggattcaaacgcgcaggtattgacggcctacgtcaaacaagatggcaaaaccgtctacaaagtgaacctaaccacccaccatggtgttagccacttcacttatcgcgatgccggcggtgattacaacaaaattaaggtaaccgatcatgccattgaggtcactgaagccaattgcttcaatcagattgatgttaagcgtggcaaaatttctaagccaggccaaaccattgtttgcttaccacacaagttactgattgaaattaaagccaaggatgggaccgacacgggcgggatggtttctgcctgatttaaaaggagtacagcgatgactaacgatcaaacgcgtaaatacatctatattgcactcttgtgcgctcaagggattattattggccttgtcgaacgcgcgattccatttccatttgccgtagccccgggtgctaagttgggactagccaatttaattaccatcatttcgttatttaccctaccggtcagcgactgctttttattgatggtgatgcgaactgttttatccgccttgctagggggaaccctctctacttttatgtatagcattgctggggcaacgctaagtttctttggcatggtactcctcaagcaatttagccgccgctttatgagtatgattggcatctcagctgctggtggtctgctctttaatgtcggtcaactctgcgtcgcgagtttcattgcccagagttggcaagtcctcctctatctaccagtgcttgcttttctcggtattctcgccggaattgcggtcggcgtagccgcgaattttttattcgaacatgtcaaaaccctgacttttttaaaagcccaacacgaaatttaatttaacaaggagttaattatggcgaaagtacatgccatgtggcagaactatccagaaatcgaaaccgaacttgcgcaaagtcttgcgctcattgaagacaacattcacaccaaaaatcaagccgtcaccgacgccattttaaagatgattagtgctggcggcaagttgctccgccctgcttactgcttattattttcacagtttaatgcagtcgatcgacagaagatgatcgcattagccgccgctgttgaaacgctacacactgcgacattaattcatgacgacatcgttgataattccaatttacgtcgccatcaagaatcgattcaagcccgtttcggcaaagatgtcgccgtttacgctggcgattacttattcgttgtctgcttcaagttactagccaattatgcgagcgatttgaagagcatccaatttaacagccaaacgatggatcaaattcttgacggtgaactcagtcagatgacaacccgatataatctcgatttaacccccgaacagtacctacaacaaattaacggtaaaaccggccaactgttcgcgctcagttgcttcatcggtgcttacgaaagccaaaaaggcttgaagtttgcccgccaagccgagaaaatcggcttaaatatcggtctcgccttccaaattctggacgatatcttagattacactcagaccgatgtcgattttggcaaaccagttctcgatgacatgcgacgcggcgtctactcgattccgttaatcatggcactgcaatccaatcgccaaacattagcaccctacttggaaaaacaagcagctatgactgatgccgatgtgcacgctgttcaaggcatcgtccgtcaatctggaagtgtcgaaaaagcccaagcactcgcacaagattacacaaaccgcgcactcgctggtcttgcgaaactacccgacatgcccgcaaaaacaacgctacaacaattaactgaacgtttattaaccagaaaagcctaaaaaagacggacaacatgttagaaatgttgtccgccttttattctcgacttaatgctcaaaagttgaccaagcttgaatgcactcattttttaacgtgctcctcgaacagtcttctccggttaactgcaaaaagggcattatggcaagtcccgccataatgcccttttccctgttaatcctcaaagcctacccagttcgagtcacactctttttttaagctgtttatcggatttgaaccgacgacccccaccttaccatggtgatgctctacctactgagctaaaacagcatttcacggttgattaacaaccgtgatataagtatatcgaaaaataaaaagcgggtcaagcccctagagaccaacttctgtatcagaaagtgctaattcaaaatgttgttgtaagaatttagcgaccccgtcattcgtattcgtttctgttacataatttgcagccgctttgacctctggtaaggcattgtccatcgcaacactgtacttcgctgattgcaacattcccaaatcattttgcccatccccaaagacaattgtatgatcggcatcaattccatgaatcatttgaatctggcgaattgcagtggctttatcaatcccggttggaatcatctcgatgttgtctggaccagaagaagacaagctcatcacagcttgatccattaatcgttgtttagcggctgctaaactctctggatgaccgcgaccaatgataatcccgttagtaatctgatcacttaaattcaacaacatttctaaatcagtcaccggttgattatcaatatcggcattcaacaataaattccccgcatcgcgcgcaacaaacttggggatttcttgggtatagtaagctgtgtcagtggtaaaaaagtgcgcagataaattgggatctgctaaacatgcttcgtaagcagctttgagcgcttttttacctaaataatgcttgttcatctgatggccattttcaaagacagcaccgttagaagccacaatccggacatcatcgttaatttgccgcgaaattacccggccaagattgtacattcggccggtggcaatatagaaaatcacatcgcgtttttgtaatgttcgaatcacgcgtttggtcaaaggtgtcacgatttgatggtcaaggaccaacgttccatcaatatctgaaaaaactaagtaaggttccatatgaattcccctcaattttgatttgtaaccggtaacacttcttcgttttagcgtatttagatggggaattaaatagccaatttcgtttcattcacaatcaaacgattaatttatagcagtaagtcttgctatttaccatgacatagtttattatcaccttatttggtaattttaataatgtctgaaggagtttttggctatggataaagaaaatctcaatatcggtgatttagtaaccggcaaagtgaacgaagacctagatggtgcatttacaggaactgttgaaaaagtatatgaaaactccgctttaattagcattacggatttcgatgcagccgacaaggccaacgtttcggaattaaacaacaagatcgttgttaacctcaagcaattaaaagctgctaaagcaaaataaaatagaaaaaagcccaccgacatttatttaccggtgggcttttttctatgctttaatttcgctgacttgtaaagaagcattcaataactgttcagcaacgagcgccaattgctgggcgtcaaacgctggtttaaacaatgcagtgtgcaaaacaccgattagaccccaacaacaataattcaaaatataatcagcgttttccggctgctgaaatggaatcacccgcttgccgtgagtcacggtcaacgcaactaatttattcattaactgtgaatcgggattacgacacaatacccgtaacatagactcgttgtcttgcacatatgacaagacccatctaaagaaagtttggccaacaatctgtggttcagaaggcaactcaaaacgttctagcaactggctgaactcatttaaggtaaaatcttctgtctggcttaaaagatcgtagatatccgtataatgcaaataaaacgtccgccgattaatatcagcccggtcggcaatcatctgaattgtaatctcattaattgggtgttttagcaggagctcaataaaacttgtgcgaattaacttatgtgtccgtttaacccgtctgtcttgcagattaaccatctttcagcctccatttacatcacaattgactaacttgtgtgcattataacacagaaacacttagattgattattgttgaatcaactaaccatcgttatagtagccttaataacaagtcatcggaggtcggcatatgtttctaacaatccaagaattacgccataataagttaaaatttggcgcactgagttttatcatctttttaatcgttttcctagtactcttcatcaccggactagctgccggtttagcaaacgatagtggcgcggctattaaaaatacgccggcgacgcattttgttttacaagccggttcggaaagtcggttgagtcgctcggcactcacccaatctgattggcaagctctcaaacaccaatcactgacacccatcaacgtcacccaagccaccatcgagcggcctaaaaaacaaacaaaaactgatattgcctacattgcagttgacgctacgagcttcatgacacccaaagtcacccaaggtcaaaagctgtccaaccaagccactcaaaaagtggtggtcagcagcaaattacaagccaatggttaccaattaggcgacaccgttaaagatagtaccactggtcagcaatttaaaatcggtggctttagcaagcagatggcttatgcccatacgcctgttatttatttaaaccaccaccagtggcaaaccatttttccaacgcaaaagacgacctataacgcgtttgctagcaaaccgcccttgtcggttaacaagcactaccaagtgatcagcaaacaaaccttgattgataacatccctggctactctgcagaacaaagttcattgtacttgatgatcggctttttatacgtcatctcactgtttgtcctcgcaattttcttttatatcattaccctacagaaattacgggactttggggccttaaaagcattgggcacaaccacacgctatctcagccagcacatcatctctgagattggcttgttaacggcagtggcgattcttttggctggcggtatcattagtgtcatcgcccagtcaatgcctgccagcatgccgtttatgctcacagcaccaacgatcatcggcaccagcgttctatttttagccgtcgccatcctaagcgccctattatcccttattcaggtgattcggattgacccgatcacagctattggaggtcattaatatgtcagcaccgattttaacactcgaacacatcaccaaagattatcccgatggtgatcaaattaatcacattttaaaagatgtctccttcacgattcagccaggtgaatttagcgccatcgttggtcccagcggtgttggtaaaagtactttgttgacgattatgggcgcgctcttgcaacccacagccggtcgtgttaccttggccggtcaagaacttgcaacactcaatcgtaatcgtcaaacacaaatccgccgcgaatcaattggttttatttttcagaattcagaattaattccctatctaacggtcactcagcagctgacttttttacaaaaaatcgcccgtcatcgcgatcaacccgccgctgaacaattactgacacaacttggattaggccatcgattacacagttatcccgccatgctttctggtggtgaacagcagcgggttgccattgctcgggcacttatcaatcaacctgcactcattttagcagacgaaccaaccgccagtttagatgcgcaacgtggtcgtgaaattgtccacttaattcgcgatgcagttcatgaacaaaaacgcgcagctgtcatggtaacacatgacgaacgggttttagatctcgtcgatcacgtttggcgtatcgaagacggtcaactccgccaaaccacataaaaaaaacggtcctttcacaacttagcgttgttgaaaggaccgttttttagttccagaggatagctactattattcgacgttttcaaatttaccccacaagttcattgtggattgaatattaacaaaggcattcggatcggcatccttaacgacccgttttaattccgttagatcgtattttgaaacaactgtcatgatcactgttgtttcttggttggtatacagaccagttccatctaattcagtcgcaccatgaataaagtcacgcattcgcttcttcaattcttcaggtcgcttggtaaaaatcgtcacagtcaccttttgttgttgaatatagatataatccatcaacaagcttgaaacaaagatttcgacgatactgtataaggcagcaccccaaccaaagaagatgcccgctgcaagaatgatcattccgttgatgatattattcacaacaccaacccgtttgccagttaagcgcccaactaacgtcacaatgacgtccgtgccaccagttgaaaaacccgctttaaaacacaagccaacccctaaaccaatcaatgcacccccgaacaaggcacctgcaaatcgttcggtgacaattgggtgaacaggtactggaatgaccttcaagaaaaggacactcgtaaaaacagcgacgatactaaaaatcgcgtactgatgattaatcttgaaccatgccagaatcaataatggcacattcaaaataaagaccaacatcgcaacacttaatgagccgcccatatagctgactaacgaggttagtaattgggcaatccccgtgaccccactcgaatacgtcttcgccggaatcaagaacagattaacactcaccgccgccaaaaaaccgtataccatcgcgataataatttttttcgaatttccttttaaagcaatcactgtagcacctccatcgattaaaaaagccacactccccccttggaagagtgtgacaaatgattaaagtgcgcacttggctataggttcttatccatgacgaaggtcaacttagaaagttgcgttccttctgtcaccaattgcgctaacaaatcggttgttgcttcatggtaatgtgcagcaatttcatgattttgctgggttaagaaatcagtggcattcgcttccgcctttacagcagcatccaccgtagcaatcttagttcttgcccattctgataatgctttttggtagtcaatatcagctttcttaaaggccccgtagtgtgattcaacaatcattgctaatgcttcatataaccagtaagcgttcttcaactgcatcttcgctggtagttcgcgataactttcatccgtatccatcgcattcgtaaagaatggtacgtgtggacagaatgttggtacccccaaacctaaccattgaacaccacgcacagcatctggcacattgtttctaatctgacagatatgtgagttttgcgtccgtgaaagtgaaattgaccgataaatcgtcttttgttcttctgtcccattaccaagtggatcgtaaatagtttcgttataatgtgattttaacacatattgaacatcttccacacttattttacggttagccttgcgaatgaaaggcaagtcactcgattcaggttcttgtttgatttcagggttcaaatagcgttgtgcataccaaacccgtggtgtgttatagtgacgatctaattcagtatccgtcccaaaaatcttacggaagttccattcagcttcactcggattcaagtgattttcactgacgaattcttgaataccttctgaccacatgtaattttctggatcattaaagtcgacatcttcgatggcaatttggttagcggcaactgcataacaatcatccggaatccgaacagcaacccagtgatgcccagtaacaatttcttgataccaaacttcattttgatcactgtattgaacgccattgccttcagctgaaccgtatttagcaatcaaatcccccatcaattgaaccccttgacgtgcagaatcgatgtatggcagaaccaacgtacacattgaatcttcagctaaaccttgcttgaccaacggatcataagctaatacccgttcgttggcataaacactttcagttgcggagagggcgacatttttttcattaatcccgtcttcttcatttaaaccatcacttaaatcgccgttgggggttgatgtgtaacgataaccgtccgtcggtaacggcatggttaagccgttatattttgaaacatatgtctcatgtcgatcatgaactgctggttgtacgaagaaccgtttaggatggattgcatagaagcgatcctcatttcgcgaaatcatcgtagagccatcaattgacgcattcttccctaccatcattgaagtacatgctgataattcgattctgtctgtcatttgaattaggttaacgtcaaaaatcggtccaactcatcattgagttgaaccgctttttttagcgcccctgccaaggactctcagtataccatattaatcaagtaaggttgtttctttcacttcatcaattgtcttggtaccagccaactgcatggtaatcgataattcatggtttaagtgttcaaaaacagattgtaccccttgggcgccacctaaatttaaaccataaataattggccgaccaatggccactaaatcagccccacttgcgagtgctttaaagacatgttcaccacggcgaataccactatcaaaaacgattgggacgcgtttagcaacttgttgcgcaattaaaggcaacacttcaaacgaagcaggtccgccatctaattgacgcccaccgtgatttgaaacccagatgccatctgcaccagcttgaatggcaatttcagcatccactggtgattgaatgcctttaacaaagactggcaaatttgtgatttgtttaatcttttgaatatcttctggtactaatccttgtttagcggcagcataaatttcagagatgcccttcccagcaccgtcagaattactataagctgctaaattaggcattggtagtgggaattggaattgcgtctcgatgtccgcttcacgataaccacccaatgttgaatcgacggtgagaataatggctttcacacctgccttaacggcttttttcaataagaactcattgaattgatcatctttactcatatagagttggaaaaattgggggggcatcaggagccgctgcggctgcatcttccaccaatgtattggcataggtactaattgagaaaatcgaaccagccgctgcgacccctttagcagtgtcgacttcccctttttcatgtgctaacccttgggctgctgagggggcttgaataatcggcgtttttaaatcaatatcccataatttagtatgtaaatcagcatgatcgatgccttttaacacacggggcattatttttttagtattgaaagcactggtattttcagccatcgtccattcgtcttcagcaccgccacggatatagccaaacgcgccagcttccattcgttctttcacgcgtccttctaacgacgctaagtttaaaatatcgattggattttccgcttcacttgtatgatatcccatgatagattccttctttcaataattgaatacctttatcatggttctcttatcaaaagtaagcaaacatttatactcggttatttcacttgcgttcgaaatccaatgtcttgccggtaaaaagtcgtcggtaaagcgagttgcgctaaatcccgatagacctgttgactagctcggcctagcgtctcagcagaataactagcggtatacaaacgcccgccagcgctgaccaattgattggcttgttctgcgacactagcgaaactaaatgtgctgttgcgttttgcaaattgttgcaaagtgggtaaaacaaacggcgttgtcgattgtgtcgggtaaccatctgaagccaccacaacacctaacgtaatgcctgataattgccactgtaacgttggggtttcccccttcaataattgtgcaaaaacttgggcccagtcgcccgtcatccgtggtagcaccacttgtgtttcaggatcaccaaagcgcacattaaactcaatcactttcaccccgtgttgtgtggcaattaagcccgcatacaagacaccggtaaaaggcgtttgacgttcagccatcgttgccacaatcggttctaaaatagtcgttaccgcttctgcaacgcattggtcactaatctggggtactggacaataagcgcccatcccacctgtattaggcccacgatccccgtcaaaggcgcgcttatgatcttgagcaaccggtaatggatagacgcgattattcgccaccaacgccatcagcgagaactcttcaccttcgagataatcttctatcaataactggggcacgccctgttcaaagaacgcctgaacagtttgccgcgcgctcacgtcattttgagcgatgacgacgcccttgccagccgctaaaccatccgctttaatcacaacgggataacgaacgtcatcgagggcatccagtgccgcttggacagtctgataggcttgataagccgccgttggcacatgcgcggccgccataatttctttggcgaaagttttagacccttccaatgccgcagctgctttacgcggtccaaagatcgctaatccagcgtcttgaaaagcatccactacgccagccactaacggttgttcaggcccaacaatcgtataggcgacctttttggcctgcgcaaaggcaatcatcgctgcaaagtcagtcatctcaatcgcaactgtttgaatcccatccaattgcatccccggattgcccggcaaacaatagaccgttgcaacagttgaactctgctgtagcgcacgcgcaatcgtgtgttcacgcgcgccgctaccgattactaatagatccatgatttgcctcctattggctagtgtttgaaatgacggcgaccagtcgtcaccatactgattcctttttggttggccatgtcgattgaatcttgatccttaatcgaaccaccaggttgaataacagctgtcacaccatgttctgcggcgtattcaacgctgtcatccattgggaaaaaggcgtcagatgctaagacgaacggtgcttttaatccattggcttccgcttgttcgattgcaatcttcacagagcccacccgattcatttgccccgcaccaatgccgagggtttggtcctttgttgcgaccacgatggcattactcttaacgtgtttaaccacacgttgggcaaataacatcgcagcttgttcatcagccgttggtgttttgtccgtcacaaccttcaattcagatgcttgatcagtcacccgatcacgttcttgcacgagtaagccgcctaaaacagaaaccatttcgaagcgatccgcttgcttagcagcctcaaaatcaagcgtcatgacgcgtaaattcttcttcttttctaaaatggctaacgcttctggggtgtagcttggtgcgatgataatttctaagaataaactgtgtaattcttcggctgtttgaacatccacttcacgattcaaggcaatgatccccccgaaaatcgatactggatcggccgcgtaggctttttgccaagcttcatagatggttgcacccaagccgacgccacacggattcatatgtttcatcgcaaccacacaaggttcgctgaattctgcgaccactttaaccgccgcatccgcatctttaatgttgttatacgataattctttcccgtgtaattgtaccgctgaggcaatcgagaaagccgttggtaaactgctttgatagaacgctgctttttgatgggcattttccccatagcgcaacgcttgtttaaagtcgtatgaacgtgttaatttttcagggaattcgatgccgactgcttcggttaaataaccggcaattaagctatcataagctgccgtgtggcggaatgccttggctgctaaataacgacggtaatcaactgcagcttgcccctcatcgacgacgtgttcgaggacttgcgcgtaatcttgttgatcaacgaccacgtacactgatttgaagtttttagcggcagaacgcaacattgaaggtccgccaatatcaatttgttctacagcttgcgcttcagtaatccctggtttttgaattgtttctttaaaaggatacagattgacacaaactaaatcgattgtctggatgtcatgggctgctaaagcggccatgtgtgttggttcgtcgcgtttggcaagcaagccaccatgaatattgggatgaagtgttttaacccgtccatccaacatttctgggaaatgagtgacttcatcaatcgcaattactggtacttgcgcttcttgtaataccttgaatgtcccgcctgttgagatcacctcgtaaccagctgctactaatcctttagcaaattcaataattcctgttttatctgaaacactgaccaacgctcttttcattgattgaattactccttctattttggtttttaattaattcagcaacaacttgcggataaatcgcgtgctctgtatcgtgcacgcgttgttccaatgcggctaaactatcgccaggcaacaatggtacttttgcttggacaatcatcggaccgctatcgacaccttcatcgatgtagtgaatcgtaacgcccgtttcagccacttgtgccgcataggcccgttcaatacttcgtaacccagaaaaggccggtagtaacgacggatgaatattgataatccgttgtgggtaggtatgcaacaatactggggtaatcacccgcatataacccgctagcaatatataatccaactgtaacggtgccaacagcgcgacaattgctgcttcatagtgttgtcgatcatcataatcacttaagcggatgaccgtcaccggtacatttcgttggcgcgctttttcaatcaccggtgcgcccggctggtcacacactaaattcataatctccatgcccgctttttttaaggcgtcatcatctgcaagtacttcaaagttagaacccgttccagaagcaaaaatcgccactttcatctcatcaacccaccaattctattgcattttcttgtcgcggtttaaccgacccaattcggtaagcctgttcttgttcagcgttcaattgggcgaggacttgtgccgctttttctggtgcgacggctaagaccatcccgatccccatgttaaaaatgttatacatctcgagtgcatccaattgcccatattgtttaagtgccgcaaaaatcggtaagcttggccatgttcccaattgaatttcggccatcacgttgtcaggcaacatccgcggtatattttcaataaagcctccaccagtaatgtgggccgcgcccttaataaaaccttgttcgataaacggctgacatgcttgtgtataaatccgcgttggtgttaatagccattcaccgagtgtctgaccaggcaattcgggtaagtgactgtcgacggacaacccatgttgttcgaagaaaatttggcgcacaagtgagtagccattcgaatgaatcccactggacgcgattccgattaatacatcccctgtttgaatcgtttcaccagtaattaattgagcttgatcagcaattccgactgcaaaacccgctaaatcataatgtttttcagcatacatacccggcatctcggccgtttcaccaccgattaacagcatgtcagcagcttggcagcctgcaacaacgccgctgacaatttgttcgatcttatccggctgcgtttgaccagccgctaagtaatctaagaaataaagtggcttagcgccttgggcaacaatgtcattgacacacatcgcgacacaatcaatcccgatggtcgcgtgtgcatcagctgcaaaagcaaccatcaacttggtcccgaccccatcggtacttgaaacgagcaccggattttcatactgccccatcgctaaggcaaactgaccaccgaagcgaccaatattttgattggttgcgccgacttgcttttgaatccgacgaaccacttcgtaaccggctgtcacatccaccccggctttttggtaagcatttgtcatgattgttgctccttatctgcttttaaacttgcctgataggcagcttcatagtcataaagtggcgttggatagtcgccgttgaaatacgccatacataatccggaatacggcgcatcttgctgtaacccaatcgcgtcgattaatccctgttcactcaaaaagccaagtgaatccgcgccaatcgtggcacacatctcagcaatactttgatgcgcggcaatcagttcatcacgtgtttgaatatcaatcccataaaaacaagggtacttcaatggtggggacgcaatccgcaaatgcacggataatgcgcccgcttctttcaaacgtttcacgatgtgcttgctggtcgtcccacgcacaatcgagtcatccactaaaacgattcgtttaccagccacaacacttttaaccacggcgagtttgcggtttaccccttgttcacgaagggcttgcgttggttcaatgaacgtccgccccacgtattgatttttaacgaggcccatttcatacggcaaaccactttcctcggcatagccactagcggccgataacgatgaattcggcaccccaattaccatatccgcatcaactgcggtttcgcgtgctaactgtttccccattcgtttgcgggccgcatggacgttaatcccacagatatcagaatccgggcgagcaaagtagatatattccattgaacagattgaatgcgtggtttcggttgtgaagaagtcagaatgtaacccgtccgcatcaatcgtcacaatttcgcctggctgcacatctcggataaaagttgcttgaacggtattgagcgcacaggtttcactggccacaacgtagcccccgtttgctaaacgtccaatcgagagtggtcgaaagccgttgggatcaagcatcgcaatcaatgaatcttgcgttaataataggtaggcaaagcccccacgaatttgttgaagggccgtcttaatttgcgcgtgcaaatcaggcccttctgcacgtcgaatcagatgcatcagaatttcagaatcagagctcgattttaagatggcccccgattgttcaagcatgcggcgcagtgtgaccgcgttggttaaattaccattgtgtgcaagtgcgaattgatcggttgcaaaatcgaataggaacggctgaatattttctaaaccgtgactaccagcggtcgcataacggacatgaccgattgccgcgtccccggttagttgggttaagtgctccggtttgcggaaaacatccgccaacaaaccgcgattgcgataacccattaagtgcccgtgatcattagtgacaatgccggcaccttcttgcccacgatgttgcaaactatgcaagccaaaataagtcatttggtttgcttctggactaccccaaatcccaaaaacaccacattcttcatttaaactttttatttcatttgacatggtatcgccgtcttccaacttaacttcgcttcagtcaccgataactcaacagttgattcagtcgtttgcacttgcataattggcgtggccgagaccgtcccaattaattgcgcctgatcttgacagaacgcttcaaacgccgtctgattttctggccgaaccgtgatgataaagcgggattgcgtttcaacaaataactgttgttgattaagggggacttgcacgcggcagccgagttgttctttaaaagtcatttcggctaacgcaaccgcaaaaccaccctctgataaatcatgtgcgctagtcacccagcccttttgaatcgctgctaagacgcaatcttgactcgctttttcagtggctaacgaaaagccgcttaatcgtcctgcaactttgcccgtcaacatattttggagttccgaacccgctaaattcgtatccgtctggccaacgaggtagattaaatcccccgctgacttaaaatcttgcgtcgtgatgtcggctgtatctcgaatcaaaccgaccatcccaatcatcggtgttggataaatcgcttcgccattgaattcgttataaaaagaaacattaccagagatgaccggcgtatcgaaaacctcgcaggccgccgcaatcccttgggcactttgatcaaattcccagaatacctctggcttttccggattgccatagttcaaacaatccgtaattcccagtggttggccccctgccgcaacgatattccgtgctgcttcggcaactgccacttgcccaccgacttttggatcgaggtataagtaacgcccgttacaatccgtcgtcatcgcgagcgcttttttagtcccacgaattcggacgaccgccgcatcgcttcctggtaaaacgacggtattggtcttcacttgtgcatcatagtggctgtatagcgagcgtttgtcagcaatcgtggattggcccaataaatcgagccatgttcgtttaacatcattaatcaccgactgataaggcgccatcgctttaaattcagcgatgcgtgctggttcagtttgtgctttatgataaatcggcgcatcactcgttaaagccgccactggcaaatcggccactaattgcccaccatgccacaattgatattgttgactctcagtcacttcaccaatccggaccgcatccagatcatatcgttcaaacaaggcaaccacatctgtttcatgaccagctttaacacaaagcgccatccgttcttgcgattcagaaagcatgatttcataagcggacatctctgtttctcgttgtggcacaagatcaagattgagaatcatcccagtacctgccttttcagccatttccgctgttgaagaaactaagcccgccgcacccatatcctggatgccgactagccaatctggatgcttcaaaattaattccaaacaagcatccattaatagtttttccataaacggatcacccacttggactgctgagcgttgggtcgccttgccatctgcaaattcatccgatgcaaaagtggccccgtgaatcccatcgcggccggttttagccccgacgtagaacacactattgccagcaccacgcgctttaccttgctgaatatccttttggtcgatgacaccaacgcacattgcgttgacgagtggattagtctgataacatggatcaaatccgatttcaccaccgaccgttggaatcccgatacaattaccgtacccgccgattccagccacaacttcttgaacaaggtatttcgtgtggtcatccgtcaattcaccaaagcgcagactgttcaaaagcgcaatcggcgtcgcgcccatcgaaaaaatatcccgaataataccgccgacaccggtggccgccccttcatagggttcgactgctgagggatggttatggctttcagctttaaagaccactgcttgaccatcgccaatatccaaaatcccagcgccttcacctgggccttgcaacacgtgctgaccacttgttggaaattttttcaaaaccggcttcgaatttttatatgagcaatgttcactccacatcactgaaaataacccggtctccgtataattcggcaaccgttttagaattttagtacgaatcaattcatattcatcatctgataacccccattgctgataaagcttggtggcttggatttctgccggtgttggttgctttaacacggttattgccctccttttcgaatcgatgtgattaatgctgcaaataaacgttgcccatcatcgctacctaataaggtttcgactgcgcgttctggatggggcatcatccctaagacattgccggcttcattcgtaacgcccgcaatattcgctaaactaccattcacatcattttgataagtaaatgcaatttggtggttcacttttaaccgttccagggtctctgcatcgcaataataattcccttcaccatgagcaatcggcaaccgaatttgttcgttcggcatatagtgttgggtgaacatcgtaccggcattggtcacgttcaacgcgactgtgtcacagataaaatgggtttgtcgattcggcaaaagaacgcctggtaataacccgagttccgttaaaatttggaacccgttgcaaataccgataaccggtttgccagcagccgcaaacgccttaactgccgtcataatcggtgccaacttggcaatcgcaccactgcgtaaataatcgccgtatgaaaagcccccgggcactaatacggcatcaaaacctgccaagctagttgctgtgtacgggacatactcagcgttttcatgacaaacatcttcaattgcatgatataaatcagcgtcacaattggaacctgggaaaactaatacggcaaatttcattgattcgtcgccaccttttgtatgtcgtagtggtattgttccatattaggattggctaagagttgatcacagatttgtgcgacctttttttcaactgcggcttggtcatcgccagccacttgcatttcaaaggacttgccaatgcgcatgccgctcacaccatcaaagccaagtcgttcgatagctttttggacagcctggccttgtggatctagcaccgaatctttataagtcacttgcacacgcacattaaacatctgtagaaccccctaaaattttttctaatcgtcgtaatacgacatcgtacaccgatactaaatcccctttgttcaagcggaaaacatccttatctagcgattcatgcgtcgtttgatcccacagacggcagttatctggggaaaattcatccgccaaaatcaagcgaccgtcataccggccaaattccaacttaaagtcgattaaatcgatatccgcacggtcgaataaatcgattagcagctggttgatctgcttagtttgtttttcaatcacttcaatttccgccggtgtcacaattccaagcgcggtggcttgcgaaatattgatggctggatcatctagtgcatcatttttgtaatagtattcgataatcggcgtggccaatcgtttacccggtgcttgaccaaacttgcgggcaaaactccctgccaccacgttgcgcaatactacttctaggggcacaatcgtcactttcttgacgagctgttcagttgctgaaatattctcgattaaatgcgtttcaataccatttgccatcaagtatttgaaaattaatttcgaaatctgataattcaataatccttttcccgtaatctgttccttgcgtttgccatttaacgccgttgcttggtccttatagaccattctcaacacattttgatcgtcagttgtaaaaacatctttcgcttttccagaataaaacaacgtctcactcatgcttgaatccctccaaataacatatattttatttaaaattaaaataatcgttcgtgttacattagggtgtaaaaaaactttgaaataacctcatttcaaagttttcatcattattcgcccaaaccaacgcggtcaaagatttctgcgacgcggcgaatatggtaatggtaatcaaacgcgtcgtctaaatcagcgggcgtcaacacattcataatccggtcatccgcttctaataacggtctgaaatcagtttgttgatcccaagcttgggccgttttaggttgaatcaagtcataagccgcttctctcgaaagcccatgatcgattaacttcaaaagaacccgttggctgtaaatcaacccgaaagtccgccccatattacgcttcatattttctgggaagactgtcaagtccgtcataattttggtgaaccgtcgaagcatataatccaacaaaatcgtagtatccggtaagatgatgcgttcggcagaactatgcgaaatatcacgttcatgccagagtgcaacgtcttcatacgccgttaccatgtgtccgcgaatcacgcgtgccaagcccgtaatattttcagaaccaatcggattccgtttatggggcattgctgatgagcctttttggcctttcgcgaaaaattcttcgacctcgcgggtttcagatttttggagaccccgaatttcagtcgcaaacttctcgattgaagttgctagtaacgccatttcagccacgtaggcagcatgcaagtcccgtggtaagacttgtgttgagatttcttgggcgcgaattcctaaatggtcgcacacataggcttcgacaaacggtggaatattggcaaacgtgcccaccgccccactaattttaccggcttcaacgccttttgcagcttcttcaaaatgtgccttatgtcgttttaattccgaataccatagtgctagcttcaacccaaacgtcgttggttcagcgtgaacaccatgcgtccggcccatcatgaccgtatcttggtaacgtttggcttgtttggcaatcaccgccaatagcgcatcgatatcggcccgcaaaatggtgttggcttgtttcaacaaataaccatacgccgtatccaccacatcggtcgatgttaaaccatagtggacccacttgcgttcatctccaagtgattcagaaactgctctggtgaaggcgacaacatcgtgccgcgtttcctgttcgatttctaagatccgtggaattgagaacatcgcattggcacgaattttcgcaacatcttcagccggaatgtgtccgagttctgaccaagcctcatccgctaaaatttcaactgccagccatgcctcatatttattctggtccgtccaaatcgcacccatttcaggatttgtataccgttcaatcatttattagcgtcccctctagtcccaaattttagtctttttaattgccgttaacgtttcatcaacagccggcgttaataacgtgacgtggcccatcttgcggttgaccttttgaaccactttgccatagtcgtgataatgccaatctgctgactgccgactggctgttagcgctgcttgccagtgctgcccaagaatattgaccattaccgctgattgccacaattgtggtatttggagtggccagttgcagacgccccgaatgtgggttgcaaattgagaaaagtcacacgcttcaatcgttagatgacctgaattatgcggccgcggtgcaatctcattaacgtagagttgcccgtcatggccgacaaaaaactcgacacctaacgtgccgactaattcaatctgcgtggcaatttttgccgcaaccgattccgcttgtgccgctaacgccgctgaaatgcgcgccgggcagatgctgatatgtaaaatgttatctcggtgttgattctcgattgcgggaaaaacggcttgttgcccggctgaattctgactaattatgaccgaaatttcttgatcaaaatggaccatcgcttctaatacacaaacactagcggttaacaactgttgagccacctccatatccattgcggaccgtagaatgacttgtcctttaccatcatatccaccgcgcgtggtcttcaagatacaaggaaaaccaacttttttaacagctggtattaattctgcaggggtcgttacaatctcaaaggtggcatgtggtagctgttggtcaacaagaaattgtttctccaacaatcggtcttgagcaatccgtagcgccttcgtcccttgaggaatccatgtatattctcgggcagcttcaatcgtcttagcatcgacgttttcaaattcatatgtcaacacatcgacacgttgcgctaacatcataatttgtgcctgatcatcataagctgccacaatttgatcatccgcgacttgtccggctggacagtctgcctgcggatctaagataatcactgcaaaccccatctctttagccgctaatgtcatcatctgacctaactgaccgcccccaacaatcccaatcgtttgccctggtaaaatttggttagtcaaagtctgcattacttgccaccgcctttgcatgcatccgtgcttgatactgttgcagtgccacttgataagctgggacctgcaagccacaaatctgtgtcgctaaaataccagcgttaacggcccccgctttaccaatcgcaaccgtcgccactggtacgccacctggcatttgcacaattgataataaagaatccagcccactaagtgccttactttgaattggcacgccaatgactggtaagactgtattggcagcaatcatccccggcaaatgtgcggcaccacccgcaccagcaataatcgcacgatacccgttcgcctgtgcttcttttgaaaaggcgaacatttcatccggcatccgatgagcagaaataatctgtttcgtataactcacgcccaactccgataatacagaagcggtctgttccattgttccccaatctgatatagagcccataacaagtgccacatcactcatattctttgcccactttctcgttgttgattatgctttgattctaacaatcttcatctgatatgtcaaaacattttacgaactattttacataaatatatttaataattcgtatttaaatcataaatacacaaaaaaaacgattaacctgttggttaatcgtttttttatcgttatggcaatacaacgaagagtaatgcacctaaaatcccaccgatgattggaccgacaactgggatccagctgtatgaccagtctgaatcacccttgttggcaatcggcaagactgcatgggcaatccgtgggcctaaatctcgagccgggttaatcgcgtaaccagtcgtcccaccaagtgatagaccgattgctgtgataaccaccccaaccactaatgggttcaaaccggctgttaattcaccacgtgttaatgctagtaaagcgaagattaagacgaatgtcccaatcaattcactcattaaattggcaaatgggctgcgaatcgcagggccagttgcaaaagtgcctaagattgctgcttgatctttagtagcttgccaatgtggatagtattgaatccaaacgacaactgcgcctaagaacgccccaatcatttgggcgataatgaatggtaccaccgctgcccaaggggtcttgccaatcattgcaaaagcaatcgtcaccgctgggttcaagtgtgcaggtcccataaatgcagaggtatatacccctaaagtaaccgcaaagccccaaccaagcgtgatagcaacccagccagcaccgttggcttttgtttttgctaagctaacgcccgctacaacgccatcccctaaaagaacaaggataaacgtcccaacaagttcaccaagcgcctgaaccattattgaatgttccatgagatttcctccaagttaagtcctattttaaatagtctaattgtgcttcagcaattgctgaatccaataattctgtttgacgtgctttttcagcgtcatcccagttcaataaacgcgccatttcatcaacaactggttgtttgatggctgctaattgatcattgtggaataagatgaagtttgtccgtcttaaaagataatcaactggtgttaatgtcatttcttcgttaactgagtatcttaagctgattgtttctttcaagttcaagccttcagcagcaccttggtccgcgtatgaaacaacccggctgacgtttgaaccgaagcggtttgctaaatcaatcgcatcttcttcatcaatccctttgttcatcgcaacttttgcatagaatttaagggtatcatccacgttatttggatcgaagtgcccacctgaaacttgtaatttcttagaatcgatttcacgaactgtttcattgaaatctttcttcaagatatcccggattaattcaagcgcaccggctgccatcttacgataatcagtaatcttaccacctgataaagtgattaagccgttttcagccactttcaaatcactaccacgagaaacttgtgatgggttgactgattcttcagcatgcgccgttcttaattgactgattgctttttcaacatctgcacgagcagctgttttgttttcgtaatcatcaactgtcttgattaagttgttgaatgattcttctgaaaccttaccgctattagcgccaccaccgttataatcggagctaccgttattagaaattaatggtcgtaaacctgcccagctagcttcaatatcgtttaaagcgatattaacgctaggatagcgattgttgattgcttttaagaggtaatcaacgtctgcttgttcaacacgtgggtgtttgaaatcgcctgtgtaatcagtatcagttgtcccgaagtacgtcttaccttcgcgtggcacaacgaaaatcatccgaccatcatgtaagcctgaatcgaagtaagttggttgtggcactgataaacgactactatcaacaactaaatgaatccctttagtaggacgaagtgtttcttgtgctttgacttccgtgtttaaagcatttactttatccacccaagggccagcagtattaatgactaatttggcatgaatatcgaatgtttcatccgttaattcatcgtgtgctttcaaaccgtttacgcgaccgtttgcatcataagtcattccgactgctttaacgtgacttgcgattgatgcacctaattcgtcagcttctttaatattttcgatgactaagcgcgcatcattattgacgaaatctaaataaacaccagcacccatcaaacggtctgacttcaagccaggttcgcgttggagtacttctttacgatcaattgtatagttggcatattgtgtaccagttacccctgccaatttatcgtataaatccatggcaatcttgacactgaacatgtcgtaagttgcttcaggttcatcatagattggtaaaagcattggtgtaggccgtgggatgtgaggtgcaatcccttgaacaacggcccgttcactaacagtatctgcaacaaccccaacgtcgaaagtctttaaataacggataccaccgtgaactaacttcgttgaacgtgatgaagtcccctcagcaaaatcttgcatttcaatcaaaccggttttgatgcctgatgcagccgcttgaatagcaaccccagcaccagtgatcccgccaccgattactaataaatcaagttgttcgttctttaagttattaattacttgttgacgtccttctaatgaaaatgtcattataatcctcctcattcacgcattttatatggtcgatgtttgaaaacctttgttgcttcaactgcttgttgccaaccagcatagagatcttcccgttcttcttcaggcatttctggttcgaaacgttgcccaactgagaaaatatgcgccaattcgtctgtatcttgccagaaaccaactgctaaaccagccaaaaatgcagcccccattgcagttgtttctaaattagctgccttttcaatcgagctattcaaaatatctgcttggaattgcattaaatagttgttgtttgcagcaccaccatcaacgcggagcactttgatatcaatgccagtatctttttgcatggtttgaacgacatcccgagtttgataagctaatgattgcagtgttgccttaataacgtcttgtcggttcgtcccacgcgtaatccctagaattgaaccacgtgcttctgagtcccagtatggtgcacccaaacctgtaaaggcaggcacaacataaacttcatttaaactggttgaagccttagcggctgcttctgaatctgatgatttttcaaccagttgcatactatcacgcaaccattgaatggctgaaccagcaacgaagactgagccttcaagtgcatagttgactttaccattgattgaataaccaattgtcgttagcaagttgttttctgacattgttggtttttcgccagtattcatcacaataaatgaacctgtcccataggtgttcttaaccatccctggttggagagctaattgaccaaataatgcggcttgttgatcccctgccatccctgaaattggtaccgtgctaccatagaaatgataaggtgctgtttcaccataaatttcagagtttgaccgaacatcaggtaacatggcccgtggaatgtttaaaatcttgaggatttcgtcgtcccaatccaaatcgtgaatgttaaacaacattgtccgacttgcatttgtatagtcggtaacgtgtgaagcgccacctgttaacttccatgtaatccaagtatcgatggttccaaagaggagttcgcccttttcggctcgttcttgtgcacctggcacttgatccaaaatccaacgaatcttagtcgctgagaagtaagcatcaattaatagccccgtcttttgatggaataattcttcatgcccatctttcttcaattgttcggcaatgtcatttgtttgtcttgattgccaaacaaccgcattataaattggtaaaccagtttccttatcccaaataatagttgtttcacgttgattagtaatcccaatccccgcgatttgatggggttgaatccccgatgatataaaagcgtttgcaatcgtcgataaaacagcgttccaaatttcgtttgcattatgttctacccagcccggttcggggaagtactgggggaattcacgctgtgcatcggcgactttttgaccattgtgatcaaaaatgattgaacgagtactggttgttccctcatcaatcgccaaaatgtatttttcagtcatcttaatcctcctttaacaacaatgttaggaaaacgtttcctcgaaaactattatagattaccgatgtccaaaaagaaagcgttttaccaaaattaaattttacacaatttaacatccttaccaattcggcatttgtagcacatccaaaattaaaaaacgggtcaataatctcagatcaacactaattaaagtccttcatctgaatcattaaacccgtttttttacttaaatcgttgcagttattttagtatataattcaccgttcatcttgctgagcgaaaccttttcgttcttttcgtttgaaaataacacgatatagattcggccaccgtggctaaatccgttcgacacattccagcctgacaaataaccacgattaacaatgagtgctggatcattgtaaaagcccattccatagtgggacgtactccctggttggaacatttgagccttactctgttcattaattaattttccagtccacaacgcgcggtcaaaacggtacatatcagtcgccgtcatatacatatctccgacccctggtagttgcgtgaaattggggagttgtcccgcagcgccatttgccagatagccaatggaagccgctggtaatcgcgaatattgatccgtcatgaaaccagtgtgcgccattttacttggttttagaattttttcttttagatacgttttgtaatcttgatgactcactttttccaaaaccttcgtcagcacaatatagttcgcatccatatagtgccacttgcccggttgttccttaatcccatttttaataatttcttcgattaattggtcgagagtcttcgtctgattatcttggtcccgaccgacaatgcctgatgtatgatgtaaaaaatcagtcagtttaatctgctgcccattcggaaagtccgggaggtaccgactgattggatcgttgacgtttagctttccttgttcttgtaactgcaataaactcgttgcaatcaacgctttttcagttgaaccaatcgcatatagcgtatctggcgtattcaccaactgcttggcccgattagcactgccgtaccccttatccaacaaaacttgcttatcgcggacaattaacgcggtacctgaaaagccaatttgctttaagtagtcatctaacgcttgttctgcaacaattgtcggttggctttctgctttaagtcgttcttcctttgctttagcagcagcgactttttgtgattcgcgctgtttctttgcttcttgcgcttgtcgttgtcgcttaatcttggcttgttgttgcgcgatttttacttctcgttggtgatgttgtcgctgaaccacaattccgcccgctaccagaccgaatatgaccagaataccaatgacaccaccaatttgacgccctttttttgacatcaactgtccctccgaaatttctaatctatccattaatttattacaatattaatgtacaatacgcttttggatttgaacagtgacattattgtcatctaaccacacgcaaaaaagcggtcgcgacaaaaaatgtcgtgaccgcttttttggaaccagacgttcttatttaactaataaaacattcgttgcagcatgggcactaacatattgggcaaccgatcccatcatcattcgttcaataacccctttccccgtaatccccaacatgattaaatcaatcccatattcttcaggaatgcgaatcgcaatttcttttttcggtgagccgacttccagaatcggggtgaccttcgttagcccatgattattcgcgtaacgaatattagccgctagttgctccttcacacgatctttttccatcgccgtcatcttggcatagacactagcatccggtgaaacatagactgtacttggaataatatgagccacataaagctcagcatcatttcttttcgcaacttcaacagcttccataaatgccttgttcgctaagtcagatccatcgaccccgactaaaattttcttatacgttgtaatcatttagcaacaccctcctattaatgaaatgaatgcgaatcctaactatatgttcatcatactgaacccaataggaccttgacaatttaactgcctaaacaaaagacatatcgttaatagctatagtaccgtcgatggtgcacgaattcgagttaaagaattggtatctctaaaaagcctaatatatactgaccctaagttaattaacgaaagcacttaatagctatctcatgcactcatttctaaatcaatcaacttaaataataatttgaaaaagaaaggactgtcacatatggatattgtcataaccggtggaacatctgggattggctatcgcattgccaaagatctcattgcagaaggccatcaagtcattatcatcggacagaatgcggcaaaaggccgggcttctgtggcccaacttggaaaagcggccttttttatccaagccgatttagcgaccaaatcaggacgcaaccaagcactggcaagcatcaaatataaagtggataaaatacacgttctagtgcacactgccggtgttttccccagctcacagaagaaaatattaaggctaatttagtcccccattatcagctaacaatgggcttagcagaccgattaactggcggtcgcgtccttatcataaccggtgatccgcaaatcattcaacaactcagcatttgcgaagaacaggagactactttacaacgtgcaaggtggttattaacccataaagctttattaaccctctttctcagttatcttctggctgaaaaagagattacggtcaattcatttttcccagggaatgtcaccgatgagctaccgcattattcccaaacattgctgcatactgaagtgccagttggaaaatacttagcactccatcccgatctaacgcagagcaccggtaatttttttgataatgatcgcaacttggtgttactcaatgctcggcaatacaactatgataatgccgaaaagcatttgttacagtatttaacagagtaattgagactataaaatcgcttatcattagtggcaacatgagaatattattttccactaaactaaaaaaggacctgagacagtttttgtctcaggtccttgcttatttgattgaattgattgtataaaaaaaccccgcagatgcggggcacaaatattaaagtttaacgatgtttgttgcttgaggaccgcggtcgctgtcttcaacatcaaatgatactgcttggccttcgtctaatgacttgtaaccgtcaccttggatagctgagaagtgagcaaatacgtctttgccgtcttcaccagtgataaaaccaaaacctttgtctgcgttaaaccattttactgtgccgttgttcataataatttcctcctgatacatatcaatgtacgttttttgttgcaataaattattgataggtaaaagaggaaggtattgtgcatccaaaactcaaattacgtttcaaaatttgattacttgaacagtatagcatggcattttctaattagcaacccgcatcccaaaactatcgactaaatcgctcgcaattcattcgcaaaaggctattaaaataggctttaaagcgcataaactttttatttaaatatttaatttctaatcattttcgaaccgttttgtaaactttgcctcgctaagtgccatcaattcctcaggctcaatttcatatttcgaacagataatgagcagttgatcgaagcaatcggctaactcctcttttaagttagctcgcttttcagcgtcgtttttaactttttcacctgggtgatcacgcccaagttcaatcgttctaacggcccgtgataattccccaagttcttcactcaagaagttcaaccgaattaatggtgaaaatcgataccaattccgttgttgataaaaatcaactaaccatgtttgatgcgcttttaaataatcttgcattttacattcactccatcattaaaaaaacacctaacctcgcaagcaatgtgcgaaattagatgtctccaagaattattgaatgtcacaggcgagattcgaactcgcgacctacggtttagaagaccgttgctctatccagctgagctactatgacctcattgattgacggtttttgctgtcagaataccgcataacatgctatattataagcaattgaagtagtcactgtcaattaaaattcgcagaaatgagggaaaaacatgcaattaaatcagtttgcacgcttaactaaatctcaatctgaacaaatcacggaattacagcgcattcatttactcccaaaggatttcacccagctccccttccaagtccttgcccaagatatttttcaacggctgttcccagaagcacatagtcaatcaacccagagcgggcaacttagtttattacaagccacaaccgaattaaatctaaccgcctaccttgaaaccattgatacttcattcgatcaagttgtcttctataatgtcgccctccaactcttgggttttgaaatgacaaccgattttgaacttgatcaacccactgcttttatgaccgccacaaaactcccatttatcgatcaagcggcatttgatcagaccgctttcatcgaagccctttatctcctattaacgacgcgtagccaaactgggttactttatctggatcaattggctaaccgtggtttttttgcagactggcaaagtgatcagccccaatttctcatcttcaatggtaaggtacaacccgttttcgataccagccatttaattcgagaagtcgtttatgttgaatcgagcctagatactgatcaagacggccaacgcgacttattagaaacgactatcttcagaccacgcgaaactgaagcgggcttaaaaattccggcactctacactgccagtccttactataaggggattaacgacgtcgatgctgatttgcacaatgttgatactacaattgcgactaaacccgttcaacaaccaaacttagctgatttaacccaaacgccaaccactgcaccgcttcctcaacctcgcgccgttaatggcacaagtatgacaactgaattaaacgcaacagatgacagcaattacagtttaaatgattactttctggcgcgcggatttgcgaacgtttacgctggcggcattggcacacgcggttccgacggcgtccggacttgtggctcacctgaagaaacagcttcaaccacggctatcatcgagtggttagccggtaatcgacgagctttcaccaaccgcaccgatggcattgaaattaaagcttggtggtgtaatcaccaagttgcaatgactggtaaatcctaccttggtactttagccactgctgctgcaacaactggcgttgaaggtctgagaaccattgtagctgaagccgccatttccagttggtacgattactaccgcgaaaatggcttagtggtcgccccaattgattgtcagggtgaagatgccgatgtcttagcgaagttgtgccaaacccgccaaaaagatgccgctgatcatgcgctctctggcactttcttcgccgaccaactcaaagccctgcaagaaggtcaagatcgcatcacaggcaattacaacgccttctgggcagcccgtaactatcgtgacaatctcgccaacctgaattgcgatgtcatcttagtccacggattaaatgattggaacgttaaactacaaaatgccggcgccttgtgggatttattgcgcgatcaaccggttaataagaagcttttcttacaccaaggtgaacatatctatatgaataacattcagtcgatcgatttcaccgatatgatgaacttatggttcacgcatcaattactcggcgttgagaatcaggctgtcacaaaattaccggctgttacaattcaagacaacgcacaagaagccacttggacgacccaggcggattggctagccctcgacaatccaactacgactttctggctaaacgaacaaacattaagcactaatgctaccgaaaatgccccactgacgacttttaaagatgacggtgttgcggcctttagagcccaaaaaatcagtacagccgcttggcaagatgccttaatcgcagatcaatcaagtttcactggcaaccggttgcgtttcttaggctccccgcttaccgaaccgctcattattgatggtcgaattcagtttagaacaagggtcgctgtcaatgccgaacgtgggctattgagcgtgctggttattgactatggtcaattcaaccgtttaggcaccacacctgctgtattagctgctaaaggccaacaactcggctatcagtggcgctatgatgatttaaaggaatttaagctcaatcgaccaagcaattatcaagtcatcactaaaggacacatcaatctccaaaatcgccacaatagttatcaaaccgacgccgtcaccccaaacgaattctatgatatcacgctcgacctacaacccacccattatgatttaacagcgggacatcaactcggtctattagtctacgcgactgatatgggaatgacgattcgtgaagagcaagcattcgtttaccaagtcgacttggctgctagccaactgattgtcccccatctaaatgattaataaggagtctttttataatgtcaaatctcatcacctgtcgtcaaaccctctccatcagtaaccatcgcgtcttcgtcaatgatttgaacgaacatgaaacggtctatggcggacgcttgcttgaactcttggatggttcggcgtccatttcagctagccgcttagcgcgcgtcgaaaccgtcaccgccagcatcgaccaactgaacttcattgaaccattcaaaatgcaagattccttgtgcatcgaaagttacgttgccggtgtcggcacccgttccattgaaatctttactaagattatcggtgaacatctcaagaccggcgaacgattcctcgggctaactgccttcttaacctttgtcacaatggaaaaaggtccggcccttcctaacattcaacccgaatcaccggaagaacggttcatctgtgccggttatgaggaacgaaaagcccaccgtctcgcaaattttcaaagtcaaaaacatttcaatcaaaatatcagtaccgattatccatggaacggtcaataacgaacaaaagaggtgtcgattatcatcatcggcacctctttttatttatcttaaaagttaaacgtccggctccattcatgtgtgccacgatattggaatggttggcttttaaaacccgccatcccaaaactaacggtcattaaaataattcccacaagaatcatacataaactaatcttcaaccaatttttcaacatctacgccaccacctttaatcgactacggaacatcccaactagccagcgtgtgattccaaccgagaaacgaattaagtatttcgtcatgtaccaggtcgcccctgcacaaatcagccccacaccaaccatcacaaaactaattccaagctgcatcaccgcaattatccagccttcttgtaagccaacaaagaacgataaaactaagctgacactcccaccaagaatgccggcagcagcaaagattgcccccagaaacgggcctaaccaaatcaagaaataaccaagtgccactaatatgatggcggtcaataacaacgtgccccataacggtgaccctaaaactaacaagatactgattaaaataatcaacatcggtgccatcttcttttggcgaaccggtttatctggtgtagctaattgcgctacaatctgagctggcgttgctaaactcgcgataatctccgcttccgtttcacccgcttccagtcgatcatcgattaattcatcgtaataatcaatcgtgttggctgcatcactaatcccataccgcgttaattctgccgcaagctgtttaataaattgattcttagtcattgttacactcccttatgtaagtataaatgcccatcactgccggccaatcggccaaaaaactatcaatcgatgcttgtcccgccaatgttaaatggaaatatttacgcaagcgtccattatgttcgacccgataactttcaatttcaccctgcgcctcgagccgtttcaagattgggtataatgttgagtccgaaatttcaacgacactcgatgtatctttgataatttggtagccatatgaatcctctttcttaagcgttgctaacacacaaaattccaagaggcctttctttaattgtggattcaaaccgatcaccctttcgaaagttaatactatattatgcatagtattgtgtcaagcataaaaaaagaacgcccatcagttttacctgatgaccgttcttttgaaacgtttgataacagtcatatcccgactgttatcaaacccttaatctctgccgccgccaaaaatttggagcattgtgaggaataagttaacaaagtctaagtacaaggttaatgcgcccataacagctaaaccagaaaccgaaatttcaccagttgcgccgtattgacggtacatcatacttaacttttgattgtcccatgctgttaaaatgataaaaataattaacatagcgtatgacaagaagtagctaattgcagctgatgccatgaagaagttaaccaatgagacaataatcacaccgattaaccccatcattgcaaacttgccaaagccgcttaagttattctttgtcatgcgaccataaatcgacatggcaatgaacactaaagcacttgatgcgaaagctgccccaatttcaccaatgttatacaccagtaaaacggccgtaaacgtcaatccgttcaacgccgcatatgccacaaacatggctaacgaggccgttggattcttcattgaacgccgactaatctgaacgactaaaattaattctgcaatcatcaagccccaaaccatccacgagctaccacttgataggattgtgtaagtttgtgctttaaacacagtcaccattaaaacagcaatcagtgctgaaattccgacaccgacagccatcaaaccatacactttactgaaaaagcgggcttcgctgtcgacattcacaacgcgtctttcttccatgaatattcacctcttatatttctaaacgggcccataatcacccgattaggaatattgtaacaaatccatccagaaagacaatcaaaatgcctaaatcttaattatctttaggacttaaattactcaataattcttcgtaagcatattcgtatttttgcacatcaccagcgcccatgaagacaacgactggttggtcgaagtctaagagcggtgacatattgtctaatttcaagacgcggccacctttagtgattttcgcacctaagtcagcacttgaaaccttccctgctttttcacgcactgaactaaagatatccgttaagaagacttcatccgcaaggtttaagctagcggcaaaatcatccattaacgcaattgtccgtgtgaacgtatggggttggaaaaccgctacaatttgtttgtctggatatttttgccgtgctgcatccaatgtggctttaatttctgatggatggtgcgcataatcatcaatgattgtcacgtcagcaactttcttttctgtaaagcggcgtttaacacccttgaagtctgccaattcgcgtgccacttctttgccatcaattttttctaaatgactgacagcaattacggctaaactgtttaagacattgtgttcaccgtaaagtgggacgtggtaatggccgatgttttcgccatgatagtaagcatcgaattctgaaccttgcaccgtccgttggatgttgcgggcttggaagtcatcgtcttcgcgtgtcccataataataaacgggcacattagctttgattttccgtaattcaggatcatcaccccaagcaaaaatccctttttgaactttgtaagcttctgattggaacgcgtcaaacacatcatctaagcctgtgtaataatcagggtgatcaaagtcgatattcgtcatgattaaataatctggtgaataagctaggaaatgacggcgatattcatccgcttcaaatgcgaagaattgcgcatctttaatccctttacctgtcccgtcaccgactaagtaactcgtcttagccacaccacttaaaacgtgagctaataagccactcgtacttgttttaccatgcgcaccggccacgccgatacttgtatagcctttcaataattcacctaagaattggtgataacgaacgactggcaagcccatttcaagggccgttttaatttcaatttggtcatcttggaaagcattcccggcaatcaccgttaagccttcgtgtaaattagtttctgagaatggcagaattttaattcctgctcgttctaaatcgcgttgtgtaaacgtatattgatcgatatctgagccttgtacttgatagcctaggtcgtttaaaacaagtgcaagagcactcattcctgaacctttaatcccaacaaaatggtaaactgtgtcatttgttatcatcttttaaacgtcctcttttcaataaatcacaattatctatatgattaaactaatcccttatagtttaccataatgcgggtttgagctaaataatgaatgtttatttttctctgttatcaattgattgatctctaaaacgcaaaaaaagcagccacaaaaattaattttgtggctgcacttaaacggattctataggtcacactctagcctaatgctaaataatcttcgacattttggaagtagactttataccatgttaagaaggtaaagatggtccagatcttccgacggccgttaatgcgttgttctttattggcatctaacaaggccaataacttatcttgatcaaagaattctgcaacgaaatcttcgctaaagagtgctttgactttttcataatacttgtcatcttctaaccattgcttaattggcactgggaaacctaacttaggacggttggcccaagctgttggcaaatgtttagcagaagcttgacgataagcgtatttcgtatcatgactattaattaagtatttagttgggacttcaccagcggccttagccaccttaggatccaggaacggcacgcgtaattctaagctgtgcgccattgaaatcttatcagccttttgcaaaatatcgtttaacatgaagtgatgtaagtcgatatattgcatttgtgagactggatcagcatccgcaacgttatcaaaatcagcttgatagtttgcttgaatcgttccatcattttgataagcaggtttcaagaaagtattggcttcatctgccccaaaaatacttggattttcgatatcaaaaatcacagattgacccgtatagaattcacgcgggttcgccaaattcgtgtataaatggacgcgacctgggaaggctggcatcttcttaacggctttggctaaactggcacgcgcacccttaggtaatttcttcaagccagaagtgaaggccttaattgttgaattgtgggagtgcatgccgtagttgacatagccagcgaataattcgtcggccccttcaccagataaggcaaccgttactttttcacgggcaaagcgtgacaagaaccataatggcacacatgatgggttcccatctggttcgtccaagtaatattggattttgtcaaattcagcaaacgcatcatcggcattcactttggtttcattgaagttcaagcctaattcatcggcaagcgcccgggctgctgtgacttcattataggtttgatcatcaaacccaacactgaagacttcttgcggttgcaaaatacttgtgacataactactgtcgaccccttctgataagaaagccccaactggtacgtcagccacattatgggctttaacggattcttcaactgcagcatcaatcttagccacttcttcttcgaaagataagtttgaaggattaaatgacatatcccaatatttttcgatgtccaattggccatcttgataagtgaaataatggcctgctgggaatctgaaaacacccttgaagaacgtttcttgtaaatcattgtattgattcatcatgaatgattttaaggctgtcttatttagttctggtttaaattctggatggcgcatgaaagttttaatttcactactgaacatgaaagtcccatctgctaaagtcgtgtaataaaggggcttaatgccgaagaaatcacgagcaccaaataattgcttagtttgtaagtcatagatgacaaagacaaacatcccacgcaattttgtaacaacctctttaccccattcttcgtaagcatgcaaaatggtttcagtatctgaatctgttttaaagtcgtgaccaagtgcgatcaattcagtccgcatttcacgataattataaatttcaccattgaaaaagactagcttagtgtggtcttcattataaatgggttgatcaccctttgctaaatcaatgattgataaacgccgaaagcctaatgcgactttatcatcgataaaatcaccatcaccacttggtccacggtgtttaatgacgtccatttgttggttcaatacttcttttttctttggtaaatcaaataatccaccagcaaatccgacaatcccacacatatgtttaacccctcttttgtgttttactgcttaattgactgcaaaacgaaataacaattaaaaggtttatctttaaccaattaattgctatctattatcatactattttaattttaataatcccataacaaaatcgtaagatggattattttagtagggctgcgactgcatctgctgtcacttcacgaccgacttcccaatcatctggcaagaccataatccctttagcaggagcaccagcaaccccgatttcacgggctgcacagatcatgccgtcactttgaacaccgcggagttgaccaggccagataattttaccttctggcatgacagcgcccaccgtcgccacaatcactttttgtccttgtgcgatattagcagcgccacaaacgatttgaacggtttgatcaggtgcaatctgtgtttgagtaacgtgcatatggtctgaatcaggatgcacatcacattcttggacataaccaacgacaatgtgtggtgtttcatcagccactaaatcaccggtgaaaccagctgctacaagtgcttcatttaaaacagcaacttgctgttcagttagtgtttgaacaccgttgaattgtaaatcgggcaataactcattcaccgctaagaaattatagccgatggtttgatctgcctgatcactaatccgtacgattgattgtttttcagttgtcacttgcttttcaacatcaggttgggtcattaccactaagatgttgggaaaagccgcttggttcatacttgcaattaacatttaatgactccttcaaggttagttcaatgagtgaataaatccagtaatttcgcgttttgttttccgatctttattgacaaaacggccgatttctttaccgttatcaatcacaacaaagctaggaatcccaaagatttcccattcttcacaaatatcgataaattggtcccgatcgatttcaataaagtcgtattccgggaattcagcttcaatttctggcatggctggtttaataaaccggcaatcactacaccaagttgctgtaaaaaataaaacatgtttcccttcagtaatcagatgagtcagattcgtatctgtcatcgctgctaattctttcattatgcaccccttcaattttactactcgttttaatataagcggtttgtccgtaaatgtccactccttaggaccaaaaattatgctatactatttaaagacaaaaacgactgaggagtttttctttgaaaaaaaatgggcaaacgtttaaatatttattaaccggcatcggttttgcgctggcggcggctgccagtgcgaagcaatatcgggcgcaacaaagaatgatcaaattaaaccaaattttagaagatgttaaagccggcttaaaacatgaaggccagattgtgggttcttggattgaagaaagtccccacttattctcacaaaacaaacggacctttccagtctatcaaggtggcatcatctgcgagcgtgaagatggtacaaaccaatttcgattcaaggtagacgcaagaaccggcgtcgtgattgaattctcacaaatttagagtgcgcagcgcggtgggcacgttctgaggattagcttagtcagacgagtgaccaatttattggtcgcttgactgacgttgctaaccgcaggaacataccgcgcggagcacgtttcaaccaatattataattaaaaaggtacgctatcctagataaaatctggataacgtacctttttgagttgaaacgtgctttatcacactgtcttttccggttagctacagaaaggaatcgatggtaaagaacccccatcaatccctttcttaggctaatcctcaaaggcaacccgtgtgataaaaacactcttgctgaaacgtgctattgacgctagatttctgcgcctaactacacctgtcaaattagcgattatatcactcattcgccagcctatgttaatgctcaaaatctgaccgagcgtcaagtgcactcttatctaaaacgtgctttcaaagctagcaccctgtgcatagctacgtccggcaaacaaccaattgcattggttattcaccagactaggctattgctcgggtgctgaccagctttgaaagcactctacttgtagtgtgcctctaatctgtaaatcacttggccgcgcttgctgaatttttcttcgtattccgtttggatgttgtcttctgcaagttcactattgtgtaaatcgagtgagatgtcgtcaaaaaccatcccataatcattcaggctcatcaatgagtattcgaatagaccttggttatcagtcttgaaacgtaagtagcccgttggttgcataatttgttggtattccgctaagaatgacttatatgtcaatcggcgcttttcatggcgcgtcttaggccatggatcagagaagtttaagtacacccctgccacttcgttttcagcaaagaaagttgttaaggctgcgccgttacccaataataattggagatttggcaatttcaattcaacttgtttttgtaaaatgacggcaatcgctgattcttggatttcaactgcgataaagttccggtctggatatttttgtgccatctgagtgataaattggcccttacctgaacccacttcgatgtaaatgggttgttctttggcaaaacgtgtttgccacttgccggcgatatcttccggactcactaaaatcatgctggggttggccgcaattaagtccgccgcccaaggtttatttcttaaacgcattatgttctccttgttgatgccaatcaaaaaggttggacacttgcccaacctttggcatttaatttttattaattatttcagaaatcactgcttctaagcgcaatatgtcacggttcatttcagtaaaacgaccacgttgataatggtgcttaatgctttggagtaggttcaaactgccgtaccagttgacgcgcatcattaattcaggcgtcacctctaggccgtagttctcaagccactcgtgccattcttgacgtggaacatattgaaataaaatcattccgaaatcgactgcagggtcggctaacattgccgagtcccaatccactaagtagagtcgattaatatccgataacaaccaattcttatggcttaaatcgccatggcacacctctgcagaaggtgcttgtaattgacgtaacgtttgcttcaaataatcagctgtttgttctaaaaatgggtgttgccgtaaatcttgcggtaagtcgtaaaaataggcttgcaacatttcgtttgctgaccagacacgaccgccaactttttgtaacattcgtttcaatagttgggattgatgcacccgtgctaataacttagcgacttgtgggctattcatctcatcacgtttcaaggttcggccgttgagccactcttgtgcggttaagacatccccactcgaaatccgcttcgtccagattaagcgtggtgttatgccttctgccgagagcgccgctaaaaatggtgatgtgttgcgctttaggaaaatcttttctgacgcgcgaacgcctaaaaatgcagcgcccgtatcaccaccggccggacgaacttgccagccagtatccaggtcaaaattcatcagcctcgactcctcttcaataaaataaagcgccaaaatacagcgctcacgttgcttcaactgtctaataactaagggtatcatataataattagccagtagtcgtcaagtaggaaagcatgcgtgtcacagggactatgcccccaaccgtttaggcaaatagaattgaacaaagccaatcacgagcacgaacaatgctaaaacacttaaaccaacttgaatcgtcatccctagtgtcactaataaaatgacactaaagagtaacgcctgaagcaataataaagtccgcattaattggctgaacgcttgaattcgtttggtcgttggtactgggtatagatgagtgaaaataatttgatcatactgattgtaaaacggtaataattgaaaaccaactagataaatcaatagaagtccgagtgccaaactcaaccaccatatgtgactgaagcacagaatgatgccccctaaaacaactaaccggatatataacccgctgaattctgtgccccgcaaaaagccacgcgcatataaatagaggtaagtattggctggtttagctataattggctttaataagccatctaaatagcgacgacgcttaacctgactactgagccctggcacatccgtgaagaggttatagaggcggtaaattcgtcccattcgtgaatcttctgcaccaactgccgctaaccaatcgaatagctgtgtcttttgaacacgcgccaattgttgtcgctgataataggctagtccaagcgctacaagcactccgactaaatttagccactgatataattgactggcaattattgccaaatcgaggattaacgaaagcccttttgttgcctgggtttcatccgcttggtaccactgacgcaactggattgaaaagcggcggtctttgatgattaccaatgtaatcaaggcaacggctatgtgccatgccgggaccgtcttagtaattaacaagagtggcgccactagaagcgtcacaaaagccattgcaattaatggtaaccagctactatataaacgtgctgatttcaaatacgtcacaaggccgctttcttttggcaataagaagacactatccgcttcttttaataatgttgctaggcgaccaaaactaactgccgcaagtaatactaaactcaatacaggttttagccaccaagcttgtggatccagtcctttgacggcgttagcatatgtgtagcccaacgctcctaataaaaagataatcgcaatcacgaaatgatcattgaaaacgaggcgcaaatacttcacttgttcttgaatatgtttttgcacgcgtttttgccataatgcttgcatggttaaccttctttcgtcatctgcagataaatatcgtcgagatcggcgtcagccatgttaaattcaacctttaattcttcaagcgtgccagtcgttcgtacgcgaccctgatttaaaagcacaaatgaatcagcatattgttgcgccgttgcgagaatatgggtcgacattagaattgcagctccttgtgcttttttttcagcaatgatttctaataaatcatgaattgccaatggatccaatccagtaaaaggttcatcgatgataaacaagtcagcatttgtcataaatgcattgacgatcattactttttgccgcatcccttttgaaaagtgaaccgggaaccagtctaacttattgtctaatcggaatcgttttaacaatgcattggctttaacccacgtctcttcaacgtttaaatcataagccatcattgttaattctaaatgctcctttaaagtcaattcagggtataagacaggcgtttctggcacataggctactttttggcggtattggtcaggattcgactgtaacgtcacaccgtctaaagtaattgtgcctttttgtggtgtcaataatccaatgatgtgtttaatagttgttgatttgccggccccatttaaaccgattaaaccaaccacttgattgtttggcacagtaaagctgacctcttttaaaacggggacgtgcgcgtagccccccgttaattggttaatctctaaactcataatcaatagcctcgttttttggtttttaaaactacttttttagtgaatcctttttcatatcatatcttaacacgaagtaaactgcgagtgtatgcccccactcaatatttttccatccgcttacaaagctgatggcagtagcgaaaagcccttgtttatgatagcattaagctgtattgagacttcaaataagagaaagtaggcataattaatggatgattgtatcttttgcaaaatcgttcgaaatgaaattccgaacacagtggtctatgaagacgacgatgtcaaagccttcttggacatcacacaagtgacacccggccataccttgttggtaccaaaaaaacacgtggcggacatctttgaatacgatgctgatttagctgcggccgttttcagtcgcattccaaagattgctaaggctattaaagctagcaatccagccatccaaggaatgaacatctgcaataataacggtgcggtggcttatcaatccgtttttcattctcatattcatcttattccacgttacacagcggatgattcatttgcaatgcaattcggtgataatagcgctgattacactgctgaccaactacaagcgatcgcagatggtattcacgcacaattggaggactaatcatgtcattttcagaaggattactagttggtggcttattagggacggcttatgcccttctcaccgcttctacaaccggccccaaacgacaacaagcgattgcccgctatttaaacgagctctcagaaagttcaactgatgttcaacaaagtgctgttcaattgcaaacagcttcgcaaaatttatcaaacgaactcaaaacaactgcagttacatcacttggtggtatcagtgatgcattgcaaacattttcatttgaagcagcaccacgaattgctcaaatcgaagaatcagttgatcgtttgacacaaaacttaaaaaaataaattcaccaaaaattagattgtatgcaagcgataaggttaagcatatcaacgattcccgcgtttttagcgtaaaacctaaatttgaaagttctgtgaagttttagacgcttcgttcaatttagttagtttatgtgttatattaattggtgaattcactacgaatttattcataaatactttgataaggatgtgtcatacaatgaagaaatggctattagccgctgccagtttattaatggtagtttcactagcaggttgtggtagcaagactatcgcaagcctaaagggtggtaaaatcactcaagacgaatactataaagaaatcaaggaaacatctgccggcaagcaacaattgcaacaaatgatcttgcaaaaagcgcttgaaaaccaatacggctcaaaagccatcgataaaaaagttaagaaaacttatgatggttacaaaaaacaatacggttcatcattcaactctgtgcttgcacaaagcagtatgacacctacatcatttaagaacagcatcaaaacacaatacttaacacaagcagcactaaaagataacaaaaaagtaaccaatgctgacttgaagaaacaatggaaatcatacgaaccaaaagtccaagttcaacatatcttagttgaaaagaaagaaacagctcaagaagtcattgatgcacttgcaaaagacaactcaacaaagaacttcaacgaattagctaagaaatattcaactgatactggtacgaagaaagatggcggtaaattacctgtcttcgatagtactgatacatcacttgactcaacattcaagactgctgctttcaaattaaagacaaacgaatatacaacaacccctgttaagacaacttatggttaccacgttatccggatgatcaagaaccctggtaaaggtaagatggctgatcacaagaaagaattaacagacatcgtttacgcttcatggcttaaagaccaaacagtgatgaacaaagtcatcactaaggtacttaagaacgctaacgtatctatcaaggacaaagatttatcagacatcctttcaagctacggcgttaacagcaaagcttcaaaatcatcatctaaataagcattaacaaaaagacccccgctgcgacagcagcgggggtctttttgtacatttattctgttggttgatctaaattaggatcttcgactgggcgatagaaacgccgcccatccattgcgaagagccgttcagtaaactgacctgcttccgcatgttgtaatgactgggtcatcatcgtgatacttgcatctaattcatcaatttgatgcagaacttctgcttcaagaacttgtggccggacaggtgaaccatattccattaaaccatgatgggccaagataacatgccgcaatagcaacatatcctcagcattcacgtcgatctttaatgtatcacaagcccgcactatctcttcatcaaccagtacaatatgaccgatcaaattgccacgaaccgtgtattccgttgaaataggaccggacaattctagcgtcttacctaaatcatgcaagataacaccagcatatagcaatgcctcatcaatttgtggatattgggcagcaatcgtcttagctaagcgcaacattgaaagtgtatgataggccaagccgccactaaacgcgtggtggttggtcttagccgctggaaaactgaagaattccgcttgatgtttttgcattaaatgtcgaaccaaacgttgccaatttgggtttgtaatttcgaataacatcgcgccaaattcgtcttgcatctcggttacttgcaccggtgctttaggaataaactggtcaactgtttgcggttcgtcccccgtcgttaagcgcagtttataaatcttaacttgcggattattttggtataattcccgcttaccttgtaaatggatcacctgacccgccgtaaatttagcaacgtcttcatcagaagcatcccagtatttaccgccgatttgtcccgattgatcttggaacgtaaacgcgatgaattgcttgccgtttttagcaatccgcacgtccgccgttttaattagtacaaataaatccagattctcgtcgttttggtaatcaaataatttctttgctgtcatgtgtcagccccacttcctctagatttaaccaatgatccgcttcaaagtgtgcttgcgtccgcggattggccgttaaataaatcacttggttggccgcactgagtcgttggagtaatgtccaaacggcgatttggcgttgatcatcaaagttgacgaatccatcatccaccaataaaggtaatgagactacgtcagctacctcttctgcaaacgcaaagcgtagcgcaatgtataactgctctgcagtcccctgtgataattcaccgacttcaaaaagcacttgatccgcccgtaaaaccgtcatcagtgtgtcatcgaagttaatcttaatataccgattctgggttagaattgcaaaatactgcgttgccttttccaataaacgggggaaccgttcttgtgaagcggccttcagcgtcgcttgaatccaatcaattgctaactgcttagcgagccactcttgggctaaatcagtaatcttagcctgttcttgtaattgtcgctgtcgctgttgttgataactgtcattatcgacaagttgcgcttgcgtcacgcgtagttgcgcaacagcttgttgctgttcttgtaactgacttgtcaaacttgccacttgttctgtaatttgagcggcttgttgcttaagctgttcttgactagcgattgcttgtaaagccgacaagtccgttgccaattcgcgttttaaatcagcttgacgttgttcattagcacggcgctgttgctcattggcaacacaactggctaattctgcggcggttgttaagttagcctttgctagcaatgctgtttgtgcagcgtcttgttctttaatcgtgtctgttaagcgtgtcacttgttgttgataataccggtaactctcgctgctttgtgcaaggtcttgtgtgagttgggtaatccgggctttgaattggctcacctgggacaagttctcttcatgactgccctgtaacgcccccacccaatcacgggcaaaagcaaacgcatcccaatacatatttagtgccgcttcgattgcttgattttcggcttgttgttgtttgagcgccatggtcaattgagtcatccggcttaaagcatgctgcatcgctaaaacttgactgattggcatcgccgtttcgtagccagtttgcgccaataataccgcgctttgttcgtgcatcgtctgcaatattgcttgttgtgcttgtaaggcagctgtcttggtttgcttttcagcctgcaacacatccaacttagcgagcgcttgttgccaagcttgtttttgcactggttggtcatggtcagattgtttattttgccacatcatgtaaccaccatagccaagtgcggctagtccaacgaccgcaatgactttcagagcgcccggcaagaaaagaccaatcatgaatatgactacgccaatcagcatactcaattgactggcacgtccatcagtcgttggcgtttcttgtggttcaacctgactaactgccgcgttttgcgtggctaattgcgcctctaaatcagccagttgcttggtcagcacttgactggtcgtggttgccccattcatttcagcttcggcttgttctagttgtgcgcgttgctcatctgtcaaaggatttggtagttgatccgtttgccattgatactgcgctgctaattgggctttttcgctagcgagttgtgcgctttggttttgccgtaatccaagtaattgaatttgtttttgctgttcatttaattgttcaaacaatggcaccaacgtctcttgattagcttgataaaatcgaaattcacctgtttgatccaatgtttcttgaacagttgctacctcggattttgcttctgctaacgcctttgcattgcgttctcgttcgaccactaatgcttggtattgttcgtcaatcgttaagtcaaacggcgttgccttttcaagtttagtttgaagtgcttgccattccgcataacttggccaacgatcaagcaaatgttgcaactgcgcttggcgttgttttaattcagccacttgcttttggtgttccgtcattgtcgcaacggtactctgcaatagacgtgcgttcgtttcatattcttgataaccacgactagcttcgttaacggattgcactaactctggataattcttcaaagcaacattcaatggccacttacgcccagagggtttgaaaattttctgactgtccttatccagttccttggcaaagtcgagccactcatgactccccaccgcaccaatcgtcaataaatgctgcaaaaaatcagcctgttttagattaaatatctgatttaaatcctgttggttcgtttcaaaaatctgcgtaaacaaagcttcatccgctggtgccaagaggtcagctaagtaatcagcgccaaattcttggccttgatcgatgaccgttacgtcgcccccaaacttaccggaaagccgccgaatcacaatatcgcgatcatgatagctaaccagtaattcaccaccgtattgtgcgccgtttttgggcacatattgttcataccgttgtttagcggtcgcaaagccgaataacacgcctttaataaaggctgtaagggttgtcttacccgcctcgttttgaccataaaggacttgatagtcggtattcaaatcaatcgtctgatcatgccacttaccgaagcccaaaatggtgactgtcttaattcgcatggctaatcccccatcttcttctcttgtagaattgtcgtgactaagtccttgagatccgcttgaaattctggtgtttcaattgcttcccggataaagttttccttcattaacggctttgctttttccagaatattgtccggtgtcaagatagctgcagccgcttgttcccagtaggcttggtcaatctgactaaattgctgttgtgctgcaaaccgcaacttcaacgcgtatggccaatgcagtggttcactattttccaattggtcttgtaacaccgccaataattcaccattattaatccgttgcaataagtcactcgataatcgctccgcgtgtgttagctctagcgccactaaactagcgtgatcactttgcatcaattgggcactcaaagccgtttgcaattgcgttaagctcatgtcaggtgtcacctcaaactgttgacgttgccactcaatgaccgtcgttggtttgaacgttaaatcgaactgaccatcgttggtatccactaaataaaagcctttttcaccaggttcattcttatgccgcccttgtaagttccccgggtaaacaatcgctggtcgttcttggagaatctggcgcttatgaatgtgacctaatgcccaataatcgtaatggcaagcgttcaattcactaatcgtaaatggtgcgtagtgatctgtatcggccgttgctttttgactaccgtgcaacgtcccaatcgtgtaagttgtgctggcacgttgtggaaaatcaaccactcgatcagctgacaaccaccgttgatcataactgaaccctacaatggtcacactctcatgtcctttggtagtcagttcaaacgactctacttgtgctccaaaaacatggacattggcgggcaattcaaaatgcacttgattggcatcccagtaatcatgattcccgtaactcagatagaccggaatgtcgacatctgccaaacgttcaaattgttgttttaaaaatttctgaactggcaaactctgcgcttcttgatcaaatgaatcaccaactaataatacaaaatcgacggcttcatcgatggctgtctgaattaattttttaaacgccgtgaaagttgacgcatggattgtttcccacaatgctgtcggtgcttgttttaatccgacaaacggactgtcgatatgggcgtcagctgcatggataaatttcatcttgaaaaaccccattcttttggccggtcgtaaccagcttagataagcttcattataccattgccacgcggtgtgataaaggcgattagaacaaacgttctgtttttaggcaataaaaaagcggtgaatcgaaatcaatcgattcaccgtttgaaacgtgcttctggttgcaacaacttccgcttaatttaaaaatcgcgttaatcctagaacctggattaacgcgatttttgtattaatgctcagttgctgaccgcaatcagtcacactcttatttgaaacgtgctttttgaaactgacttttccagttaactacaaaataagactgatgacaaaatacgccatcagtctcatttttaggttaatcctcaaagccaaacccgtttcaaacgcattctatgcttggtagatatctgcgattggttttgagatgatttggtttaattcatccattgtttggcttaattgacgttcttgttccatcaagttcttgattgcgtcgatatccccaattttttgagcaagttcttggatttctttaatttcgtcgtccgttaattcttgaccttgcatttgtttttgttgaagtgtcatttgttgcgtttggaatttcttaaacattgtgaaggcaatatcgtcttttttcaatgctgcaaaggcattttgtaagcctaaaaattgtggtaattcttgcaagtgcgttgccatttggttggcatcatcataaatattaactgtcattgtactgactcctttttccatgtatttaattgaaaaaacctttcaaattattataccattgattggctgtatctttcgctttatttatcccatctttaaaacccgattcaattgaatcgactaattcgttcgatgtcccactctgttcttttttcgccaacgattgagcatcttcagtatcaaagtccgtctgtgctgtggttggtaagagttgttgcatctcatatttaaagattggtgctaaaccgtcaatgctagtgttcttcataaagtgatcttgatccgtcttgtcataccccatccaagtcgcaacaacaatatccggcgtataaccgactaaccattgatctttggtcccaaagccataactatcaggcacttcagtactaccagacttccctgcgacttgatagccgttgggtttcgcataacgcccagtcccattattataaacgcccaacatcatgctagtcatttctttggctgttttttggctcataatccgtgtcttggatggttcggtattatcaacaatcacggcgccactcgcatcaacaatcttccgaataaaatgtgtttcagacaattcaccgttattcgcaaaagccgtataagcactggccatttggtaaggtgaaaccccaccttgccaaccacctagagccatcgccaagttttggtcactcttgggtactgaaatgccgaatttttcgaccgacttaatgccgcgtttgaggccgatttgatttaataaccaaaccgccggcgcatttgtactgttggctagcgcctgatacattggcatcgatccggtataaacgttatccgggttcgttggtatatagtggttagtcccatagctttgcttcttatcttcaagtgatgaatcatagtggtagccatcttctaaggctggcgtataaaccgccaatggcttgatggttgatcccggttgacgcttcatctgtgtaatgcggctataaccacggattgtatactcaccacgaccaccaacgacggctgataccccgccggttttcggatcaattgcaactgaactaccttgaactaaggtgtcatccgcagcgttatcagggaacaaccaattttgtttaaaggtggtttccatcttactttgttgggattggtcgagggcagtatagatcttgtatccgttcttaacgaggtcttcttctttcaacccaaagcggttaatggcttcattcacaacctcatcaaagtaatacggataacgatacccatccgactgctcgtaggtattcgtcacgacaagttgctctttcttagcagcgtcggcttgtgcttgcgtcaacttgttattatcgaccatcaagccgagaattaagttccgccgcgcagtcgcattatctaaatggtcagccggattatagaaactagggctccgcaacatcgctgcaatcacggcgccttcactagcatctaattcactcgcattcttaccaaaataccgttttgacgcatcctgaacgccccacaccccgttaccgaagtaggcattattcaaatacatcgctaagatatcctgtttggaatagaccttggtaatctgaacagctaagaataattcctcaaacttccgcgagaacgtctgcttctgactcaacttggcattcttggcgagttgttgggtaatcgtactcccaccaccggtaatctgcccatgatgaatcactaacccaactgctgctcgtgctagccctttaatactgaatccatgattggtataaaaggtccgatcttcagtcgacaaaacagcattttgaatctgcggcgatatcttatcaagatcgacataagtccctttttgcgaatataacgtccccgcgcgttcatccttaatgtcataaagcgccgttggggtttgtaagttggccttaatctcaccgacgttagccgtcttcgctttaaacgtgagccagctgctcatcgcgaaaatgagaattaaaacagcgagaatcagccatctcgtcaattgtagtcgataccagacataacgaatcacgcgccagacgcgtttcataaattgtttaatcgccaaccaaaacggcgaatcttgcttgttcatgcgatccctcttcttacggtcaaaattaatcttgtttaattgtagcatattcgtcaattgacactgatgccaatcgaagacattaacaatcttttaaaatttacttttacaccaattttcgctaaactaatagcttaaaggtggttgaactctaatgataatttaccaaaaaaaagtgactttagcgcccgactttagtccgatgtctgtccgcggcctgctgaatcactggttagtgccgcaaaaaatgcaacatttcttgcggattaatcaagatattttggtcaacggacattatctcgccttcaaccgacacgttgaagctggcgatcaaattacgatgaacttctcagaagtttccgttaaggtccaagactacgaacttgatgaacggcaatctttttccgttttatacgaagatgatgatttactggtcgtcaataaaccggcggggattaaaacccatccgaacggtcctggtgaaaacttcaccctaatgaaccaagtggcggcctatcttgctaaacaagataaaaaggcctacatggtccaccgcatcgatcaagcaaccagtggcgtgctcttgattggtaaaaccccaatcgtcatcggcattttaaaccgacagcttagtcaaaaaacaatgtcgcgccaatacatcgctattgctaacgatccggaacaaacactcttggaacatgcaacgattaacctcccaattggtgtcgatccatacaataagcgcaaacgcacgattgattacatcacaggtttatccgcagtgacccattaccaattactgcatcgaaaaggacctgcagcaaccttggcagtcaacctcgaaacagggcgaacacatcaaattcgcttgcacctggcggctgatggtcatcccattttgggtgatccgttgtactttccaaccgattcaacacagcgcctactactccacgggcaaacgttgcgctacacagagcccttcacggatgaacaaagaacagtaacagcccccatcccagacatttttaaccagtatgtagattaaagagtgagttatcagccggatatctcctgaggattaacacagaacatgtttagctcaacaaaataaggcgttgcgacaaaaaattacttttgtcgcaacgtcttatttgtttgcttatctcgctgttgctagatgttgtgcgaaacgttcgtttaattcggctgctagttcctcactagggctaatgataacaatcgtatcgtgacccgccagcgtcccgacaacttctgggtaccccaaatcatcgattaaggctgctaataaattcccgttacttgggagcgtcttaattacgtttaacatttgcacttgtgtaatggacaaagccacttcacgcagtttatcttttaatttctgagtttgggtgcgttcgtcatcgtgaaaaatcgtatagcggagctcaccgttcacatcccgtgccttaacgatttgcatctcccgaatatcacgtgaaatggtcgcttgcgttgcatcaatcccatcttgtttcaacgttgctaataaatcctcttgcgtcgaaacaacttgctgattaatgatttgttcgattcgtgcttggcgatctccttttttcacgactgccacccctttttaccttaattggctctattataccagtttttatcaaaattcgatagacagcgctttatataattcaaaaaagcgcatgttcataacttttttacccacaaaaaaagagcgccgattactcgtgtgcccttttaagattaagctttccgtgcttttcgtaccttaaatgtggttaaaattgcgaccgcaacagcaacccctgccaaaattgagaggaagaacaaaccaatattattggttgcacctaacaccccaacgattgggccaccatgtggcactgcatcggtgattttgaagaccatcccgactgcactagcaactgctgaaccagcaatgatacttgggaaaacttgttttgggttagctgttgcaaatggaatggcgccttcagtaatcccaatcaagcccattaagatagctggaatcccagctgatttttcttcttctgtataaagatcgcgacgaacaaatgttgcaatccccaatgccaatggtggaacagcaacggcacaagcaacagcacccatgatttgtggatgtccagccgtaatcgatgccaccccgaataagaaggccactttattaactgggccacccatatcaatcgcgaccatcgcaccaatcacaacgccaagaatcacactcgtttctggattttgtgaaagggtcgttaacatatcttgtagtgccgtcatcaaccatgaaataggtgcgcctaaaacgagaattaaaacggctgagataatcccaacccctaataacggaatgacaaaaattggcatcactggccgtaaatcttttggtacgggccatgaattaaaccatttaaccaagtaaccagccgcaaaaccaacgataatcgcaccaataaatccagtcccggcttttgtaccaaggatgtctgtattgttggcgaccattgcaccaatcattgcgggtgctaaagctgcacgccccgaaatagcataagcgatataaccagtgagaattggaatcattaaggtaaaaccaatcgtcccaatctgattcatactactccaaatggtatgtggtggaatcaccattcctgctttagtcggatgcccaccaatcgcgattgacaaggcaataaacaacccaccgacaacgacaaacggaatcatatgggaaaccccatttaataattgcttaataattggactttgttcatgactgtcctcttgtttagcttctgttttcggctgattcttgccataaatacctgccgttagtgctttttcaatcagtgtatcagaatctttaatagcttcagcggtcttcgcatatagtactggcttgccattaaaccgttcttccccatcaacggcaacgtcagcggcaataatcacgaaatcggcatcagccacatctgcggcgcttaattcatcctctacccctgaagcgccttgtgtttcaatcttaacttcatatccgcgagcttgcccggctttttgcagtttttcagctgccatataagtatgggcaatcccaactggacattttgtaatcccaacaaactttttcatcttctaaatcctcctagttaaattcgatttcatcgttaactaacgtgtagagtgccattgcatcatgccgattttgcttcaaattatgaataaaagcgtcatccatcaacttgcgcgcaaacttcgacaacacttttaaatgcgtcttattagggtcatcgagcggcataattagggcaatcgcgatttcaactggtgcgtcatctaatgcttcccaatcaacaccagtttcaaacgtgacaattccgacaactggttgagttaatcccgccactttcgcgtgtggaatcgccaccccattcccaaaaccagttgtgctctcagcttcacgcgcattgaatcccgcggttaatgcaacccgatctaacccattcttatcagcaaataattgcgctagtgttgctaatgccgtcggtttatcatccccaacaacgatatctgtaaaaatattttcaacatcaaattctttcatctggtaacactccattctaatttttctgattcaattgtgccaagatggcgagggcagccgtcccatcagatgcttgtgcgacttgctttaaaagacggggggtttcaatcaattggtctaaatcatgataaatcgcccgcatttggccatgaacagtttcgttcaaggccataaagaagacgagctgcactttgtcgttgtgttgccaattaatactttggggtgcaatcagcaacccaatggctggcttggtaattaattgtgaatccgcatgcggcaaagctactcgaccaagtgccgtacttgctaaagcttctcgggccagcgctgcctggacaaccgttggctttgcatacccttgatcaatgagccgctgaccaattaattcaattgcgccttgatccgttaactgctcttgcgtgacaattgtcagttcgggttgcaataaagctactaagtgattggtaggcgtcggttgttcagtaatcatctggcgaatgattccaatatcatgccgatttaacaaaggactgacttcaatcaccggcactgacaaacctttaatcgcaatcgtactgatgactagcgattccttaatcggggttgcaagtagttctcccaaggcaataatacgagtaatccgtaattcttgagcaaacgttttggccaaccgttgccctaataattgcgatgtcccaatgccactactacaaaccaccacaacactcaagcgtgcatcttctgaatgtcgttcaaaaaaagcttcaaagtgtaaactaataaaggctaattcgtcctcattcatttgaatctgatactgattttcaagcaccggctttagtaacactgcttgatcaaaggcttgcggaaaattctggcaaatttcatcagtatatgggttattaatactcaatcccattgcaagccggcgaagtgccgaacttaaatgaactgctaacccctgaattaattcctcatcaactgctaattgagcaagctgttgccgtaatagttgtggcagcccgactgattgccgcaactcggtctggatagtttgaacagatgtatccttcgattggaccgttactaaatgacggttgagatattcctgttcaaaatccggaattgtcaattcaaatcgccgttctaaaatctgtactaacagctgtgtttcggcaatgaacggtgtcaccactggttgggctccattgcttccaccagttggtgctggcatcatcagatgaatcgctaacaactgaaactcgtaatcagtaaatgatagcgtacttttttcaattaattccgttaaagctgtgagtatgtttttaatcaaggctggttcaaacagttgattcagattatccggtaattgaacatggcgcactaactgtccatttaactctttagcctcagtccgttttccccaatactgactgattaactccaccgttgcttgccgcttttgatgctcagaaccgattaaggataaaccggtatgcgtgattgccaattgaagaccgaattgcgcgagtttttgctttacctttttcaaatcattctcgactgtactccgactcacgtatagggtattagaaagttgttgaatcgtaatcgatgctgaacctaataataatttagccagaatgcaatgacagcgttcttccttggattggggacgatcattggcctttttttcaagatgattggctaatgtcgcgacatccccggtaaaataaataccgtcattcggttttcgaacgagtttcacattaaagggctctttcgatatcattcaaggtggttgcaatggtgcgctctgaaagctgtaactgtgcggcaatgtcgacatagtacgttttatgctgggccaaactatattgaataatagcgtgttctcgtttgttcatgcttatcgcaactcctcgtttcaatccctctacgctatctatagtctaatgtttatgtatccgcttgcaaacgtaattatttgcaagattattctggtaattattgcgcaatgctccataagcttttcttaatcaaccggttatgctggggattgtttatttagttgctagcctaatccaatccattaccttatccggtcaatttatcgcacaaaaaaagagcatcttaattaaaagatgctcttactagatatgttttgctcgccatattcaatggtaaccccctaagtcaaaagactacaaacataatcctttaacgccggctgttaaacctcaaaatgtgccgacacgaacatattcaattattttttgatattgtagaatgagttgatacctttgtatgaagctgtatcgcctaattgttcttcaatacgcattaattggttgtacttagctaaacgatcagtacggctcattgaacctgtcttgatttggccagcgtttgtagcaacaactaagtcagcgattgttgtatcttcagtttcacctgaacgatgtgaaacaacagctgtgtagccagcttctttagccatttcgattgcttctaatgattctgttaatgtaccgatttggttaactttaacaagaattgagttagcagcgcccatcttgatacccttacgtaggtaatcagtgtttgttacgaagaagtcatcaccaacaagttgaactttttcgccaagttctttagtgattgatgcccagtcttcccagttgttttcatcgataggatcttcgattgaaatgattgggtatttagcaactaagccttcaaggtatttaacgaattcaggtgttgtgaattcttccccagttgaccaacgtaatttgtatgtcttgtcttcgttgttccataattctgatgaagcaacgtcgatagcgattgaaatatcttcgcctggtttgtaaccagctttttcaatagctttgatcaagtattgtaaaggttcttcgttgtttgcgaagtcaggtgcgaaaccaccttcatcaccaacagaagtaactttaccgtcagctgataaaagactcttcaatgcttggaaagtttctgaacccatacggatagcttcgcgtacagatttagcaccaacaggcataatcatgaattcttggaaatcaactttgttatctgagtgagcaccaccgttgataacgttcatcattggtgttggtaatacgtgagcgttagggccgccaagatattcgtacaatggtaagcctaattcgtcagcagcagcacgtgcagcagctaatgaaatacctaagattgcgttagcgcctaatttacctttgttttctgtaccatctaattgaatcatagcagcatcgataccgcgttgatctgtagcgtcgaaaccaatgatttcttttgcaagaggaccattaacgttttcaacagcttttaaaacacctttgccaccaaaacgtgatttgtcgccgtcacgtaattcaacagcttcatgttcaccagttgaagcacctgaaggaacgattgcgcgaccaaagccgccatcttctgtgtaaacttcaacttcgacagtaggattgccacgtgagtctaaaacttcgcgacctaaaatatcagtaataattgacatgtaattttctccttttttggctaatgctaagcattagcgcttttttggatgtcaggcaaagcctacatctattttagctaattttacgccattcgtaaacaggaatgcgttaaaaattagtcgttaaagtgaactaagtctaagaatgaagcaggttccatacttgcgccaccaactaaaccaccgtcgatgtcttctttgcccatgatttctttaacatttgcaggtttaactgaaccaccgtattggatacgaactttgtcagcaactgtttggtcgtataacttagcaactgtttgacgaacaacagcacagatttcttgtgcttggtcagcagaagcagttttaccagtaccgattgcccagattggttcgtaagcaatgaccattgagctaacttggtcagctgaaaggcctttaagaccttctgttacttggtttgaaacccattcttcagctttgccagcttcacgtgtttcaagtgattcgccacaacagaagataggtgtcatgttgtttttgaagattgcgtgtgcttttttattgatatcttcatcagtttcgtggaagtaatcacgacgttctgaatgaccgatgatgacataatcaacacccatttcattcaatgtttttggtgaagtttcgccagtgaatgcaccagcatcttcgaagtaacagttttcagcagcaacttttaagtctgtgcctttagctgcttctaataaagcaggtaagtcaacagcaggtgcaccgataactgattctgtttgatcaaacttaggtaagttggctttgatagcattcacgaactcagttgtttgagttgggttcatgttcattttccagttaccagcaatgattggtttacgcatgagaaaatctcctcttaattttaaattatttgtctgaaatagcagcgataccaggtaatgtcttaccttctaggtattcaagtgatgcgccaccaccagtagaaatatgggttaacttgtcgccaacgcctaatttcttaactgcggctgttgaatcgccaccaccgacgattgttgtagcgcctgataagttacctaagaattcgccgattgccaatgtccctttagcaaagttgtccatttcaaacacacccatagggccgttccaaacaacagtcttagcatctttaaggacgttttcgaagtcagcaattgctttaggtccgatatctaatgccatgtagccatcaggaatgttaccttcaacaatttctgtcttagcatcgtttgagaatgcgtctgcaacaacgttatctacaggcaatactaatttgtcgccagctttttcgattaattctttagccaattcgatcttatcttcttcaactaatgagttaccaattgataaacctttagcagcgtagaaagtataagtcataccaccaccgacaatgactttgtcagctttagctaataaatgttcgataacaccgattttgtcagaaacctttgcgccacctaagatagcaacaaatggacgttctggagcgtcaactgcttcgcccaagaatttgatttctttttctaataagtaaccagcaactgcaggtttgttattagctttcatagctgttgcaatcccaacgtttgatgcgtgagcacggtgagctgtaccgaaagcgtcgtttacgaacatgtcgcctaatgatgcccaatattcgcccaacttaggatcgtttttactttcgcgtttgccaaagtcgttgtcgatgtcttggaaacgagtgttttccataaccaatacttgaccatcagtcatcgcattgattgcatcttctaatgctttgccttcgtttgaagcaacgaaagcaacgtctttgtttaataattcgccaagacgtgcagcaactggtttcaatgtcaattctttcttatcttcgtcactcttgatacggcccaagtgagaaagtaagattgccttgccaccattgtcgatgatgtattggattgttggtaaagcagctacgatccggttatcgtcaccgataacgccgcctttgattggtacattaaagtcaacacgtactaagacttttttgcctttaatatcttttaaatctgcaactgtttgttttgccatgtggacaaacctcctagattttcataaaaaaaggcggaaggagtttacctcctcccgccttataaaatgctatcgcattcctaagttcacaaaagtgaaattagattaagctagcaaatttttctaatgtacggatcatttgagcagtaaagcctgattcgttgtcataccaagcaacaactttgacaacttggcctgcgccaccgccaacgatttgtgtttgagtaggatcgaatactgaaccgaattctgtaccaatgatatctgatgaaacgatttgatcatcgttgtaaccaaatgattggttgccttctgtaactttcttaacagcagcgttgatttcgtcagctgtaacttctttgtcaagagttgcaactaattctgtcaatgaaccagtgataactgggacacgttgtgcgtggccgtcaagtttacccttcaagtcaggaacaactaagccaagagctttagcagcaccagttgaatgagggatgatgttagcagcagcagcacgtgcagcacgtacgttaccaccacgatcaggaccatcttgtaatttttgtgtagctgtgtaagcatggattgttgtcattgtaccagctttgataccgaaagcatcgttaactgctttagctaaaggtgctaaacagtttgtagtacatgaagctgctgagatgatgttatcgtcagctgtgattgtgtcatcattaacaccgtaaacaactgtcttaacagcaccagcaggagctgagataagaacttttttagcaccagcatcgatatgagcttgtgatttttcttctgatgtgtagaaaccagtactttcaagaactaagtcaacaccatcattcttaacccaaggaatattacgtgcatctgattcagcataaactggaatgttcttgccatcgataacgatgctgttttctgtagctgatacttcgtggttgaattgaccatgagctgtatcatactttaataagtgtgctaacatgtctggtgatgttaaatcattgatagcaacaacttccaatacatcactgtttgttgcgtaaatacgacgtaaagctaaacgaccaatacgtccgaaaccattaatccctacttttgtagtcataatagaatttcctcctttaggaaatgaaaaattttttattttaaagggttgccccttgtaaaatcgagtttgcggcaccttcatccgtgattaaccacgtctgtttaggtgcaaggtgcatgtacgcttggattgcttgggctttagaagcaccacttgcaaccgccagtacacacggaatattcaataagtcacgaatctgtaatccgattcgcggaatcttgtacacgacttcgccttgtgcattgaagaagtagccaaaggcttcacccaccgcatgcttttctttaagcatcttgatggtttcaatcggcatctcacgacgttcagccatcgcaatggcttcaccaatactgtgtaaaacaccccggcttcgttcaatcagttttaacacttcttgaacacttggttcttctaacaaaggcgcgtacgtcttctcactcacctgttcaggcacatacaatgcccgatgcttaccacctgtctgcttagccatttcggcacagactgcattggcctgaatatcaacactttcaccaattccccctcgagctggcacaaagattagattgcgctgtttcgatagatcagttgaaagttcatgagctgcttcagccatcgtcgttccgcccatcactgccacaatactttgcccttgtggtaataataattgtaacgtactattgactaatttgcccatttcggtgaggacttttggttgttcatcactattgccagaaacaatcaagcaatgttcaatgcctaagacttgactcaactgacgttcagtctgatgtaaccctaagaattgatccattacttgtcttaactgatcgagggtttcattccccttcacggttaaaaccatacctgatttagacgaattaagcaaaccttgtgctttcagaaaatccgtctcagttctaattactcgctcgctcatcttcagttgttccgcaagcgttcgtcggccaactggcgcgagccaatcgatatgttgtaacacctggtaacgtttcttaatgataccgacgaaatctggcgcaaccgcttctattgcagataattcatcgcgcaattgctatcgcctactttccgtgggacataaaatgtccatctgtgtcattagtcgacccatggttggcaaaaaataaaaggcaacttactaaaactagtaacttatccttttgaacaagaccattataacaagtgcagaaaacagatgcaatgctttggggttgatgaatacgttttctttccgaatattttttaaacgttgatttatcgcgatttatcaaaatttacacttgaaatttccgcttaactccgctaatataatatattgtactgttgagtacgcggaatgcgtcgctagtgtaatggatagcacccaagattccggttcttgagatccgggttcgactcccgggtgacgcatagatataccttttataccaacgattatcatcactttgtgtggttcttgtgtggtaaatgtaaaaagacctgtcaattttatgttggcaggtcttttttgttgtactccatatgtggtcaataataattgtcttttcctattacatactcaaaaagagaccacctaaattaggcggtctcttttctacgggttaaagcttatctttgaactgcaacgttttgaccgccaaccattaagcaaccacattcaaccatcttttgcatctgttcatctagttgcaccattatatcatgaattgtccttaaattggcgctaggttcatgccgacagataaacaagggcaagtcattccgagtgtaatagtagctcatactgccaaccaccccaataccctctttgtgtagctcaactttgccagtctcattcagagttaaataatattgctcattgatccgcgctggtgcaaattgttccatctgactcgctcccacttttgttctgttctcatcttacaacagataatttttgaattacattcttgacatggtatttatcgactattaattgcttgcgcttattaaagtggccaaaaattgaaattggtgcattctcttctgctaggtaaacgaagttaaacgcatctttagcgactagacagttataggattgctcatccgttttaagctcaaaccgcactagatacggggtaaagctgataactttaacggtgctgttgatcgtgccttttaaactaatgtattccatttcaaccactcctttgcgttttaattatacgaacatacattcgtatttgtcaaacgtttattgtataataattgcgaggtgatcagatgacgacactcatactcgttgccggttgttaaagaccggtttaatgaaccttataatttttatctagaagaaatggacggcgctacttacagtcatgggctgggagtggttgcctttgagcgggttgaggaatataagaacgtgctgcgcaaattacttgataacaatattaaagttgaatatcggcaattctagtatttttatagagaactattacgatataatagaataataaactatacacggagtgattaaatgaatccatatcgttggtacttaaataataaagacccgctagatttcttatcttttatcgttaaagtgatccttttctttttaatactatggatttcattttttaaaaactacacctactatgaagatataagcataaatcactatccaatcaatacagcccccttgtataagaatatttctgatgatatcaccctaaatgggacagaagatgcaaataaagttctgtacatatcgccagaaacgacacctgtgaaactaacgattgagaaatataatccctcacctattcctactggaagttataagccagttaaatctataaaaccggtgactattgaacctgggacatcttataaaattacttacttcgaaacagatgccatccctgagtatcaacttaaacttgaaactgatactggtaagtcaacagtttctatggcttttaatggtaaataccaagtaaacgatagataccggattaaagcaaaactaaaacttgtaccatttttgattaataggttcactaattaatatgtatgccctcataacgagggctttttttaatatgttaatgtttgaccgggatagatcatcgagttgatgctcttgccgtttttagctgctagtgtgtacatattgactcctagcttgttggcgattaaccagaatgagtcgccgtatcggactgtgtatgtgcggttagttgatgctgcaccagacaccttaattgtttggcccggatatagcattgtataaattgtcttgccgtttaatgcggccagattatacatactcatgccatgacggttggcgattgaccaccagctgtcacctgattggactgtataagttgaaccggacgttgtgttaccagtgttggtgctgataatttcaacgtcttttttgttggcccagctcatgacgccgtttaatagcacgcggttgccactgacttgaagcaccttgtaggattgacctttgataaaggttgggattgattcgccagtcgcccaacgttgcgctgagaagttaaccttgaccgtattaccgactttgatttctttcttggcagtgtcgtccgcctcttgacccgcatcggtggccggtgtttcagtcaccggattatcatgtttcgtgtaaccattgtcggtaatgcccgttaaatcaatgttaccgtctagaccgcctgcgatatacgttgatgtaaattggaaaatggcgataccagttcgtgatgggaaaaagttgtaattaggtttcggcgtcaccgcgtagttaggatattcggctaaccatagcttgtcgccaaacttggcaataacttgatcaacgtttaaatggttttgcaaataatcacggccaccgtataacattggtgtgtaacccgcatttttaatccgttgcatggcgtacataactaaatcggtattaacagcgtacgttgacgcgccctgttctaagtcaattgcaaggattgaaccttttggcgtttgcattttgcttaagacataatttaaagtctgatcagcggtggcgcgattatggatgttttcccaccaaaaatagctatgcgcccgcttaccctgagcgatggcggattggacttgcgtcttataagtccactgttcatagaggccattggcgttgtgcccaccaatttgagcaatcgcaaacttgtctgacccgtatccgaatttgccaaattgaccttgataaacggcccaatcgacaccctggtcacctttagaggcttgcgctaacccagttgatgcctgggcaaataaaatagccgtcatcgtggcgactactagtttcattgattttttcattttgaatctcccttcgtggtgtcatagacgacaccaattaagcctaagattgtaagcaccgtattaacgatgccttgtacttggctagctaaatcgttgctgaattcaattccgaaaactttggccacttgctgaactaacacaatgactagagctgtcagcgaagtccacaacacctttgaatgccaatctacttttttaatcattaattaccctcctattaatttttcaaataaaaaaagacctattggaatcaagatggctgtaatggctgtccgttgagtccatttagatctctcatttaagtctccaatatctttttgattttctttggcaatactataagccttttcaactttggttgcggtcgaatctagatgcctagtatttgtttcgacgcgtactaggcgctcacggatgtcaatgagcatctctgtcacgtttaaatcttctttctcattactcaaaccatgttattcctcctacagtattaatttaaatgcaataaaaatagcaatccataatgggattgcttaattgttagaaaaaaatttagcgatttttcagcaaatttccgataaccttcatcattcggatgcgatgcgttctatcccttccttatttgctcatatttgcagctagcggcctaatatcgtgatataattatgctttggaggcgatgctatgaaaaggttaaagctaatgtttattagacatcttttaaacaaaacacctgaaaaatctatgctttttgaagtgcaacagaaaagttagacaaaattaaaattttaagcaactaatgtatgttctcggtattctgccggggacatattttttgttttcaaagaaatgcgtcgatgattaaaccattcgacgtattctttagaaagttgtgtgagctcagaaatatccttgcaaggtgggaatccatttaaacattctgttttataaagatgaaaaaaactttcgattggggcattgtcgtgacaatttcctttacgtgacatactttgaatgaaattattatttttaagtttttcagtgtagtaatttaattgataatgccatccttgatcagaatgaattattggttgcacagattcaggtagcttgataatcaactcgttcagagttgatattatcaagctactattaggactatcatttattttaaatgctaaaacctctttactagcctcatccgtaatagcagaaatatacgcccaactattatctttcaatcggacttgtgttacgtccgtatgtagtactttgtagggcaatgtctcattaaaagtttgtttcaagatgttgtctgagattcttccaacattgcctttatatgaagagtatttgccattcttatgacgattatacatagatacttgaacgtttaattcatccattagacgacgaataacagtgtcagacaaatggatatttaactttaaaagttctttttgtactcggcgataaccgtaggttagccggcctcgaaattttccatcttcagtaatcttaatgatttcttttttcacatccgcatacttgtcttgataatttttaagccttttacgctcgtcatgataagtagccttcttaatgcctatggcattaagaatatcacctattttatatctatcggatttagataattcgtcttggtcagccctgatctgatctactatttgtgtttttcgtttccctttgagggtccgaacagggtcactgatttttttaggatatcacgttccaatttagtgtcataaagttccttgtttttttctgcgagttcctctcgtagacgttctacttcacttttgtttactaattgacgtaattgctttttatttcgtttcattttggtcggtctacctttcggacgaggcttcaaacctaatataccttctcgattaaaagtagtgcgccaaatactaatttgacatggtataagatcgaatttagcggctacctcactttgtgactcgtcatgagtttgatagtagtctatcacatctaatttaaactcggcagaaaattctcgtttaacatttctacgtttaagcgaatctacaccgcttaaacgatatctttgaatccaatgagcaacttgtcttctaggcaaatagtatttttcggcaattcctttggcactaatatttccttgaagatactcaccaactatcttagcttttaaactagaactgtatttgaccatataaaaagagctccataactgttagatttcttgtctaactattatgaagcacttcattttgtactcaaaatattggggattaaagttggaactggcgcctatatttgccagcctgattatattgacactgataatattacaattggtagtcacgcttttattaatcatgatctgtatatctacactcgaaactatcccggaaccggtataacaattggggaccacgtttttttagggccaaaagttaaattattgtgtgtcggccacaatatcggaactgctgaacaaagggctggaatccacaaagaagccccaattattattgaagatggcagctggattggccttaatgcaaccattatgcccggtgttacaattgctaagggttgcgttatcggagctaatgccactgtgaccaaatcaactacccctaatggcgtttacgttgggactccagcaaaaaggattcgtgatttagactaagccctattagggctttttttattgtctagaaagaatataaccttgctgaatatctccttgcgtcataataccgcttactgcggtgttaactccccaatccaacaccgcgccgtctgcataaaatgtccacacaaaaaccctaatatcattttttgagtatttataaaaatcgtctcgatttgatcccgcttgaacactagctataatttcgttcgtatcatttctataaggtaacatcttggctaggttatcatcagcggttgtttctttgccaaataaaaaggccagttttgcctttggatctagtgcttttaaatgattaaagcgcgacgcttcaaagctttgccaaataatattacgttgcatgccatatttccagaccagccccatcacagtgtcgatttgtgcgtcgcttaagtcgattttaagttcaagcactagttttaggtttgctcgtttgccgtatttaagtaggtcttccaaagtcgccattttcgtgccaatataagcgtccacacgtcttttttcgattaatgaataatcatacatgtttaacgtcgcaagagtattgtctgccaccttaatcgtgtcagtgatcgctgtcccgtcatcattaaccgcagtcctattgattgtttcatcgtggattaacactggaatattatctgatgtgaagtgaatatcggtttccacatatttgaaccctagtttttttgacatcttaaacgccggcatagtattttctggcgcaaaatcgcttgcccccctatggttaatcgcaatcacatttgcatacgtatcttcttcataagttgaattaggaagaccgttaatcgttatttctgacggggaagttatgatcgcctgtctcgttgaagcatttttgtcagtagaattatctctgatgatcgcaattgtatagtcgttaaattttaaaggagcgtcgattctttggaatttaaaactattgtcgctctctgaataaataagtctggcatatgttgaagcaccgctttctgccactgtattaataaccgttacgttatcttccataaccacgccttttgagtcttttaacaacaaaaagactttaggctcgtatgaatttttaagcgtaaggcgtttttgagaattaaaatcaaaaacatgggttgagtcgttatagtccggtttaaaggtcggcgaaggaacaatcttagcccaacggtcgtgatcactaggataatctccgttaattaaaaccgggaaattggcgctaatgagtggttttcctagttcaccccccaatctgcgcgaacactcattatacaaatttcggctggttcataattattatcccaagagataaatctaaacgacaacgattctgtattaaacatgagcctcgtcgccgtgtagtcgttttctggcgtgttaatgattttaagcccttttgggatttgaaatctgtgaatacttccccaagcaattagcgctagcttagggctatcgccaaacgtgaacgttctcgtcgattggtcataattgggaatctctccgccaacaatcaagctgtagccggataggacgctttgcactagtttatcccccgtgatcgctcctgcagcgattttttgttccgttattgatccattttcaacgcttccgataaccggtgcttttccagccattgcagcttgaacctcttctgaaagattaattaaccctagtttagcgccgtcgttgctggtgtccatatctgctcgtttaatcttagtagccgtgttacgctttacggataattttgcatctgtttcagattttaaagctgcgatttccgttttatcagctttattggcattaataacagcaatagcattgtcctgcgcgtcttcgcgaatgccgagcaactcaaaattgctacgagctgctacgacttctgctgattgattgccgcccgtttcttgcataattttaaccaatgcttccccttgctgggccatcgcttcccgggtatcttcgccataagttttgtggcgcatcgctttactgatttcacttagtgattgcaattttgaattatcgaacggcgttggatcacgataatctactgtatctcttttgatttcatctgccactatttattacctccttctaacgcagttatgcgcttttcaaaatcttcattggcagtttcttgttttgtatttagcgtttcttgatttgttttaaattcctctaaatcaagcacgttttgaccaatctcaccgagggtggtaatgattgtagtcgtttgattctctagcttggtcaatttggctatgattgctttgaaatccgcatcaccgatgttctcaattaacttgtcgtactcggtttgaagcctggttagattctcggtcgttgtggcaagttcggtggtgatggcggtgactttggtggattgaagtgccaccttgactttcatctcttgaatagcgacctcgtttttcaacttaattgccgactcgtagtcttcctgacttagcagcttgtcgccgattgagagtgttgagctgagtgggttacacaaatccagcgactggccgacaatccgcaagcgctcattaatgcccatcaaaggattaattgtgcgatggtaattacccgcttcaaacgtatcaatggtcttatctgttaaaagactgaggtcaaccgcgctcacttggaactgctctttgatcagccgttgactgtccagcatggcttgcccttttgatttcaggattgacgtaactttcacatcgtcccaaacctctggatgcacaacacggccaatctgatcaaccaacttttgcgagactaaaaaaggactgccagcattgacagtctcaatcgttaatcttggttgtgatatttcggaatctccctcattggcttgcgtcgtcgtttcagcccttgcacctaggggcttgataatcgaatacatagcgctgggatcaatcgaccttttgatggacagcagattgctcgctaatcgaatctcttgattgctttgaatggcaatctcgggcatgtagtcgaggtacaacccgtccggttcgtggcgcagtcgaatctcaccaccgtacttcgtgatcagcttatctttaatggtctcgtaggtcgtctttgagtcatcaatcgacttgtagacattatcagacgggctagtcactgtaacttgccccagcttgatttttttaaacgcatcaacttgacggttatgcacatcaatcatgtgttgcaagaacgacttcaagtcgttgtttgctagcgcgtaatagtcctgcgttgaatcatgtagaaacgccagcaagccttcacaggtaatttccttgttaaactcgccactagtcgccatcgaatcggttgttgggagcacacgcccttcaaatagcacctgattgcgcttgggaatcgtcactttgacgaacgtcgtcatccctttaaagtcgttgtaatagggtgactctgggctaatgctaaattgaaacgaatcaattgcatcgatgtcccgcataatcttagccgttaaaagcttggtgtcgttcaggttctccgaatggattgtgtgctccgtgccgtcccagccatctcttaccgtcacccgatacatattagatcaactccttatgccaattaaatgctagtttacccgtgccaatcacggtgatggtaatctcaccggttggcaacataaaatccggactgcttgacgtgccagcgttaagcgtaaatcgttgtccgcctacttcaatcgtgaacggcgcactggcgatcagttcgggcgagatagacgtggctccgatgttaaacagcgtaatggtgcgtttaccgacgatatcaaactcagtattctgcgcgatatccgtttcgaagttgaattcgtcccaaatgtcgttgccttccgccagttcatcgatgcggaacgggtaacacgtaaattcaaccgacaatttaccataggcgcgcatctcatcccatgagggttctttctgcacctcgcccaggtaataatagttgtgcatgatgtcgtctttcagcttcactttttgcgccggtgccatcaaccaattaacgacctgcgtccataacgaatatagacgctctttggattggtcttctccatcacgcacaataaacgtgattttcatggtgcgctccttatacgtctggccaccgtatagatcactgatatccaagacggtgttgctaaacgggattgcctgcgtgattttattcttggcgggcatccccaccgttttggcttgcacgtccaaaccaaagtcgttggatctgtgcccattgaattcaatcccgtatgaatacttagattttattgtcaattgcaactccccttgcttttagttgattacgacgtgctcgttctgtcgacccgtattcttcatacgctggagaaaatgacgaaccatcgactacagtacgtttatcggcaatgatgcggagtaagtcaagcatttccgcgctgttggctacgtcttgggttggtgctgaataggtgttgtaaaccgttggcgttgggcgcatcatctgcgcgaggttgttgccagtcaaagcggccggttcgtcaaatgcaatggcgggcgtcattgataggctcaacttgtcggccatacctgaaacggttgattgaaccgcacgaaatgcatcttgcaaactcttatttaatccgcccatgattgcactcccggctgggactaacaactttgcatcgtaactaattggacctttatgctccttaatccaaccagcaataccgctaacgaatcctttgaccttttcaaatgacgcctgtaatccgccaagaaatccattcatgatggcgtgtccggcgctgcttaaattaatgttaccgagactaccgaagattgacttgatgctacctacgatgcctgaaatagttgtctgtgccacacgaactgcaccagtaatgccagcccaaacacctgaaatcgcggctctaagcgctgacccggctgcttgcaatccactccaagcggctcgaatgccacttactgcaccactaatcccaccgccagcaatcgacactgaggacttaatcccagaccatattgcagacaacattgacccaagtgcggagcctgccgctctcagtgatgtccaaacacccttaatgatttcaattgtggctgagataccactaccagcgaccgaaatagctgatttaatcccgttaaagctatcggagataatagctctcaaggtggtgctgacaccacccagattgccgaataatccgacaagttgaccaatccaactggctacagtcgttaataccggcgcaataaagttgaaggcggcgaccagaacttgaataaccggcgttaaaaatccgattgcaattcgaatggcatcgaatgcgattgaaatactcgacaagatgcttttgaacaccccgcctaaaaaggcgcccactatttgaagtgctggcattagtgcactggctaatactgaaatgagtggttgggctgcattccacaatccgacaaacgacgtgattacatttgaaatcgctggaccgataacgcccatcattgtgctaaagccggcagtaacagctggcacaatcgccgacactaagttttgcaagccactgaagtcaagtttggtaaatgcgtcaccaatcatttctacaattggtgtaatcgcacctacaacggttgtgaatagtgctggcagttgtgtaaagattgtacccaacgtacttgagataaccggcccaattgattggaagattgattgcaatgctgttttaactgttgaaccgaattgcgttaccgttgacataatgccacccaatgacgctgtgacagcactcgggccacccgccatgccttgcgttaatccactgatcaactgttgcccacccgccataaaactcggggcggcatccgcaatgaatgtcgtgattgcgccaggtagcgcctttaaaatgttaccgaccattggaatgaagttgttgaacaagaatgttgatgttgtttctgccaaagcttgtagcgatggcccaatatcttgacccagtgacaacttaccaagtacattggacagtgaagccttcatcgattcaaacgaaccactaaacgtgctggcggcttccttggcggttgtgcctgtaatgtccaattcgccttgcacaacatggatagcgttgtaaacgtcggctaaattgctcatgtcgtatttctgcccggagattttttgcgcatcggttaagagccgttgcatttcttccttagtcccgccataaccaagcttcaagttgtcaagcatggtgtagttctgtttagcaaagccttggtaggcgtgttgaatgtcgccgatactcgtccccatcttgttggcattgtcggacatgtcaatcatggccatgttaccaatgtcggccgccttttcggtgtcaccgccaaccgattggagcaagctggcactaaagctcgtcacgttttccatgtaggcattcgcagataaaccggctgtcttgtacgcttcattggcaaagccttttaccttatcagcactgcccttaaacagcgtctcaatcccaccaagcgattgttggaggtcggcaccttccgacaatgatgacgagataattttcccaagtgtggcaccaacggcggccacacctgcgattgcggcaagcttaatgccggtgccaattttggagccggcactcttacccgctgaatccgcctcaggatctaactgccctttgatggcaccgctaaggcctttggctgatggcacaatttgaacgtatgcttgtccaagctcagtcgccatttggtccacctcctatgattaatctgtttctaattcgttcgaaatcctcgccagaatcaaaagtgactgccgaatctgcagattgctttttctgattgcccataacggcatctaggattgattgcggccttttggcaccgcgctcagcatctttagaccgcgaccacaacaacaggttcacagcatctagaatccccatgagcacttgcgtattgactggcactgcttgctggttcatcttcaatttgatgcgtgaatcattgcgcaagttacacgaaaaagcagccaccgttgataacggtagctgctgatagtcgtatatttggtaggtttcagcgagatcactgattaaggcatcttcgtccagcttaatcatcttggcaaggatcattagttttttgtttgtttttgactctgtaaaatctctttgatttcatccgccatcgcttcgggtggcacaatgccatcaagttttcgcacatggtttttcaaccgcttagcaccatcatcacccaaaagtaatttaattactctgggcaaggccattgcatcatcttcaagctcgctaagcgcttcaagcagttcataattttctaactgctcttttgagattgaaaatttaaatcccgatttcgtttttccttcatttcatttatattatacctaattttagccgcaataagcagtaaaatcacttaattcttcaaattaaaaaccgctaacgtcaagcgagacagtcaaccacgtttactagaatgagaggctatgtattgtaaaaattgtgtatatattgtaaatttttctgtttttatccccgtaaacagtctagaattgtagtagtgcttttttgaataatataactatattaagaaggataattgaatctatatgaaaaacattgctttgaacatccgagattttttcttagatgacaaactactcttagccgctgccatcgcagccattgtcacctcatttttcaaccgcccacaacttagttacgttaatttccacgtgatcgtcagcgtcttttgtattatgacgctcgttcaagtttatcaacggctccacgtgcttgattacttcgctcgcgagttaattatcaaaagccgttccaaacgagccttgatgcagatgttattagcactaacgtttgtcggcgcgatgttcttaaccaacgatatgacggtattaacgttcgtcccgttattcatcttaattgcgcgtcaacttgaattttcaccaatcttaccggtgacgctcatcacgatttcggctaacctcggttcttcattaacaccgtttgggagcccgcataatattttccttgtttcgttttaccatatgacgattcgccatttcttcgaatattcaattcccgtcttgattgtcagcgtcattatgttggcagcaacgaccttcctctttccaaaagaacccatcaaacttcacgggttacatcccgttgaagttgaaaaagggccactgtggtatttcgttccattaacggttgtcgttttcctcgcagtgttctcattaattccattatgggtgacaccaattctagtgattatcgcgattctagcgtttgatcctaagttattcaaaacagtcgattacggcttattactcacattcttctgtttcttcatcgctgttgggaatttaagtcacatcccaacgattgccacattcatgcgatcaattgtcggaacagcaaaacaaacctacatcaccgggattatcagttgtcaattgattgcaaatgtcccaactgaaattttactttcaagcttcactaaccacagccacgcaatgttcttagccatcaatatcggtggggtcggcacaatgtttgcctcacttgcaaacttgattgcttacaaacgatttaagaaaggctggggcaaagaccttggtaagttccttgtcgttttcactggcatgaacttcttattcttaatcattttaggggtattcggctattttctcatctaattcttaaaaacagggcaactatctttacgatagttgccctgttttttgtcattttaacagtaatcgtcatgatagcattcccattcgcgtcttactgccgatcaacgccatcgtgacgccctttaattaagttcctaaattttacaaacatatgactaacatgacaaattaccccatttctgtaaagaaactgctatttaattgacatgcagcattgatatactctcctagttccaaaacttacctaggagtgacgctttattatcaaaaacaaaccattcttgttagctatcggccttatattgctgatgctaattacaacgaatatcgcgcgtgccgcattaaccaatgaagcagcaccagaaacgaaccaccctgtccaaaagctgatgtcatctaaagccattgaacaattcacggggcaacctgcccaagcagctgaaacgtcactggtcaaacacgcaactgttctaccaacagacaaacccgttagctgtccgattcatccagatcctgattccgcagaaattaaggaaccaacgcccgcccctgagccagaaccagttgcggccccagcacctgccgaaccaaccttaattgacaaagggacattcaaattaaccttttacgatcccgcggtccttggcgcaacaagtatgcccggtggaatgtacgccggagtcgctgcgcacttgggcgttatcccccgcggctcacaaatcaagatcacattaagtaccggtgaagtatggtaccgtgttgtcaacgataccggaaccttcgccgcttctaactcacaacaattagacgtcgcaatgccaaattgtgacatcccctctgccggtgtcttaaatgccaacgtgcagattgtccaacttgcttaattaaaaaaagccaaccattcagatattacctggatgattggctttttttgatgttcaatttagaaataatcccataacatcggtttcgtatgactaaacgcagcactgagttgagcgatttgctgcggtgtcccttgcacatgcccaaagtgtgcttgactctcaagtgtgcgataccccaacatcgccttagttagattttgaatcgtaacggtgatgtctgcggtccccgttgctaattttgtcacagcagcatgtcctgcatgaatacttaactgccataaaccggcattttcaggtaagaaatcatcttgaaccgcaatcgttaccgcagatagttccgctacttgataggcataacgcgcgaagaaatcagctagtgacacaatccgtgccatcatataagggacggttgtcgtctttacgattgtgggatcaggcaataaatcagctagcgactcagtcagtgcactctcatactgaattgtcgcataagctgactgatgcttaagaataaagctcaatagctgttcttgacttgcaactgtcgaggtcatcagttcttgaatcacaaacgtctctggttggcgcgtataaatcatataccccgcaacccgtcctgtatcttctcaatagaccgccacttcccaatcactatgcttcataacatcatattgccaccaccaatcagtccgctgcacaccaccgacttgattgtccggatgctgattgaagaacgcatcaatcaacggcaccgcttgcgccaatgtcatccgtactacttatcctgcactcggtgcaaatttcaatcgtggtaagtcagccgtttgaatctcaaagtgcgtctgatcaaaagtttgttcatagccaaaccgacgatagaagccgtatgaaaatggcgcgagatacgaaagcgtcacaccttctgcacgcatgtgttcaaacgcgagttgcatcaatgctgcaatcccacctttgcccgcaaactcggggtaactcgcgacataaccaatgccactcatcttaaaggtttgcccattgagccgtacgtcaaacggcgtcgctaataagccacttgccaaccggccgtcatcaaaaacgccaaaccctgcactatgtgtatacaactgtttgaagaattcttggcgcttagcactatccggtttattaaacgcatattgtgctaattcataaaatgctggttcatctgttccaattaactttcttttttcaaccactgcacattcctcctgccatcacttatctttcactataagtgagcgagcaacaagatgcaagcgccgcctttgtgattagaccgctttttatgcataaaaaaaacgaccttttcttgggagtggtcgtttttttatagggagaaatctatgggtattagggagttatttcgttaacgaaattgcacgaagttgttgtgaattcactagaattcgttgcatcaacttgtgaaccgtaaaacgatcagttggtgcatagttcaagattaagatatgcacagtttcttcacatttctcaataaccttaccgatctacgtcgcagacataatttcgtttgattggccgcgaattaaatcacctacttgaatcgccatgtccagttcacctcgttaatttatttaaccatgacctcattataacgaaaccgctttataaaatcaattatttacttattgtcataattagtaaatatttatgattagtcaagcagcttgcctatttttgaatcttgcgatagtcagcatcgaaataccggccttcttgaatatcttcaatcataccttcataaggtgcttcgctaattacgtcttcgttattttgtcctgcatcacccatataagtaattgtggcaaattcaggcactaacatcttaggatatgtttcatatttttcacgtgattcttccatgagtgcaatgtgatcattttggtaggtcactgtgatttctggatgttcttcaacccatttagggaagaaaatcatgccgtgtaacttgttttcgtttggcatgaagtccaacgcaacatcagtcccagttggttctgtccaagtaatcttgaagacgccgtccgttaacttaacgatgttggcttcttgatcacgaacccaacgacctgcaaccatcccaccatgaattcggtagtcaactgtgtggtcgttctttgcataccattcatacttccacccattatcgtaagtgtaaatgaaatatgtccctaagaaatcttctaattctttaaattgttttgtccttttaaaagccttcatataatgtaattaaatacatgtttttcttaacgtgataagtgtactgctcaatcctttttttgtcaactttaaaaaagggcaaaaaaaaatcgccagcaaatagctgacgatttttcttaattgatttcagttgctaattggcgtttcaccgcgtgtttaagaatcagcggtgccaaaacagtggtaatgataatcacgaaaataatctctgagtaataaagttcactcaacaatttagcgttgtacccaatctgcgcgataattaacgccatctcgccccgcgaaatcattgccgcaccaattgtataggctccttgtggcgaattattcatccaacgcgcaccgagaccacttccaattaacttcgagaaaacagctaacacggttaaaatcgtaataaatagaatatgttgattcaagcttgctaagttcatcgataaaccgatgctgacaaagaataccggaataaatacggtatacccaatcggttcaatatggcgattaatctcttccttatacggggtttgcgaaatcgcaatccctgcgaaaaacgcgcccactaccgcactcaattcaacggcctcagcgaaccaaacaaatccaaaacaaatgattaacgatgtaatggcgctcgcatatggtactaacaaacgacgactcaaatgcataacaaatggcacaatccatttcacactaaagtagaccgcaaccatgaataaagcttgcagcaataaactcaaccccaaactcatgtgggttgaactagctgcagccagttgcgccccaaaaagactggtcaagacactcaagataattacggccagtaagtcatccactaccgcagcacctagtataatcgtcccttctttactttctaacacgtttaattcacgtaaaacttcgactgaaatcgatactgaggtggctgcaaaaatcaccccgatgaataaactctcaagttgactaataccaaaggccaagctcatcccatacatactgatcaccgggacaatcacccctaagacggcgaccactaaacttggtttgaaatacttcttcaacaaggtcaggttactctccaagccagcgatgaacatcaataatacgacaccaatttcggaaaacgtgtggataaaagaattttcatgtaagacaccgaacaacgcgggtccaagaataatccctaccaggagttgcccaatcacagctggcattccaatccgtttgctcatgtgtcctgccaataaagtactgattaaaataattgctaaagttgccattgattcatttccctccataaaaaaagcacgccaaaattcccttctaccaccctaaagaaggaaatcttgaacgcgcaatgcttcaaccgtttttttaacttatgtaataatactaccacaaagccgcactgggcgcaaagtttaaacgttgaattggtaatagtattcattagattgacatcgctactttttcctgataattttagagtaataactaactggaggtgagtatttttggatgacggctcggacgaagcgttttgtttaattcatcagattattccttattatcggcaagaataacgatcacgaacgaccgcattttgactttcgataattaaaaggagcttaccatgactaaaacacacgcttatcaacaaacattagacgaactgcaaaccaattatgcccaccaagattttgaacaggggctttcgcaaacagaagcggctaaccgcttagcaaccaatggtccgaataaactcgagagccatcacaccccgaagtggcaacttttcgtgcgccaattcaacaacttaatcatctacatcctaatcgtcgcagccctattaacactcatgatgggtcactattcggatgccatcatcatcggtctagtagtcatcattaatgccatcattggttattatcaagaagcgaacgcatctgatgctttggaacgaatcaaagaaatgttggcaaccgaagcaaccgtttatcgtgacggtcagcggatcgacatcccaactgaagacttagtggtcggcgacgttatcttcctagaagctggcgatagtgtaccagcggatttacgaatcgttgatgccgataatctgcgtattcaagaatcagccttaaccggggaagcagactcagttgaaaaaattgcaacacgcttaaccgaagaagaagttgcccttgccgatcaagtcaacatggcctttgcctccacttccgtcactaacgggagcggcttaggcgtggtcgtcgcaaccgccgctgataccgaaatcgggcaaatctcagttgctgtcaccgaaacgaaaacccgcccaaccccattgactcgcgaaatcaacggcttagggaccggcgtttcatttgtcgtcatcggtgcggccgtctttttattcctcttcggcttacttggcgaacattactcactctcagtattagcaatcgcgattgtcacgatggtggtcggttcaattcctgaaggattacccgcaacaatgtccgtaatcctcgcaatgggggtcagcgacatggccaagcacaaacacgccatcgtcaagagcttacctgccgttgaaacgttgggctccgtcgacgtgattgcgaccgacaaaacggggacgctaactaaaaacgaaatgaccgtgaccgaaattatcaccgccgaaacgacttaccaagtcagcgggaatggctatgcgcccgaaggtcagattttattaaatgaccaacctgctgaattggataccaccctcacacaattcttagaggctagttatgaagccaacgatacgacgctttatcaagccgacaatggttggaccattaacggtgaaccaactgacggtgcctttttaaccttatatcataaggttcatggtatcgacgacttaccaacaaatacagaaattgacatgttacctttcgattcggattaccgctacattgctaaactcgtgcaactaactgatggtacgcaccgaatctatatcaaagggtctccagataaattattcccaatggcccaacaggcaatggtcgatttcccaatcgatgactggaatgccgatgtgacccgtttatcagaacaaggcaaacgggttgtggcggtcggttatctcgacgtgccaacaacgactgctacaattacccatgaacaactccaacaagggattcaactcttaggggttgccgggattatcgatccgccacgcgatgaagtcatccaagcgctcgccgaaatgaacgctgctggggtcgatgtcaagatgattaccggtgaccatccactgacggctaaagcaattggtgaaaagttaggcttagcaccaacgattaatgcgattaccgggccggaatgggatcgcttgtcggacgctgaaaaaccaaaagccgctttagaacaccaagtctttgcccgcaccacaccacataacaaactcgaaattgtcgaagccttacaagccagtcgcaaagtcaccgcaatgaccggtgacggtgtcaatgatgcgcccgcattgaagcgcgctgacatcggggttgccatgggaattaaaggaaccgatgttgccaaagattccgcggatatgattttaaccaacgataacttcgcaacaatgtccgtcgcaattcgtgaaggccgccggatttacgataacatcaaaaagagtattctcttcttactcccgacttccttcgcggaaggcttaatcatcgccttcacgattttgatgcaacaagatatgccgttgcaagcgacgcagttactctggattaacatggtctcggcgattacgattcaattcgccttcatcttcgaaccagctgaagatggcttaatgacccgcaagccacgtaagaccggccaagcgctgatgaataaacacgatgttttccaaatggcatatgtttccgtcttgatggccttaatcggcttgttagcctacgattggttactcggccgcggtgtcgatcaagtcacagccagcacaatgatggtcaatatcattgtcatcagcaagattttctacttgttcaatattcggactgcgaaactcgccttttcaaaagctttcttcaccaaccaaaaggcattcggcattatcgccctgatgattattctccaattgatcctgacctacgtgccattcatgcaacaaaccttctacaccgaaccgcttaccttattagaatggggcgtttcgatcggcgcaggcttcttgattctaatcatcacggaattcgataagattatccgtttaatctgggcaaaaagaaaggcatagtaaaagagcgtttttctcgataggatgagagaaatgctcttttttggtgtgcttttcgaaactggcttttccggttaactacaaaatgtgacttatgaccaaacccgtcataagtcacatttttaggttaatcctcaaagtcgacccgcttcaaacgcactctaaacgtgcttcggcaagcatatttctgtacttaaccaaattcacccaatcggcgattacatcgccaattgggcaaatccagttaatgctcaaaatataaccgcttgcctacgcactctataatctactaatcacttcttctacattcttaatctccaccgacattgtgccgtctgggtggttgatgaattcaaatagatttgggttttggtaaacgtcgattgggacgattagttcgatgccgtttgagagtttgagtttttgtttgccgtatttcttttcggcgatttcgcggacggctggtgagattggcgctggtgctgctggcgcgttttccgtcatttctgctttaaactcactttgggctgaaacgttgtctttaaaaatcttcgctgccatctggctcgtgtcgatttcaccattggtttcgattgtatcgtagatggcttctttgacgttggcgaccacatcgtgtttggcaacttcgaacttcttgccgattttttcagcggcctttttaacgaccttgacgttttcttctagcgatggcgctggttcgctttcaatcacgttcgttgataaataggtcatcttttcaccggagaaggtgtacttcttctccatcaattcgaagccaaacgtctggaggttaatcgcgaacccctcatccgccttttgggtcttattcgatagaatcgattggtgaatgatcagttgattcatcaatggcccctcttcagcattgacataatgggtgaaggcttgatgataatcgaccttcaaaaaagccaagtaagcttgggcatcttgttcatacaagacaacaaacgcatccgcactcggtgcatcgtcacttttctgatagaccgtgtaccatttttcaacgaggcgttggctagcgccgataaaatcagctgtcgcatcgcgcagaaaagatgcgagctcagcatcttggcgtagcacgccggtcttactctgggcagacgataatttcttaatcttgttggttaaatagtcgcgtgtgttcccattggtgagatctagcacctgttgtgagtaaattggatcgccgagttcgcggtcgaccacttgtaaaattgcttgtttcaaataaatatccattagttaacatcccatctgtctagcgtgtaaagtattgagcgccttcaatcgtgtggaagaaaatcaccgtttcgaccatctcattgttgacgctttttaaaaatggccattcgccttgtaacacacggagtgccgtgcgcggccgtgataattcccgttcaaaattggcctgtacctgaacgggggtgtctttaaaaatatgcgcatcgtataaatagcgcgcatatgccgcaaaaatctgttgggcctgttccgttttaatcgcggcatacacttcacggagtgtctgcagtccatatgtcatcagacttgccaacatcaacgacccatttctagtctcaacacgtttcaaatagcgaattagattaccccagaactggctatacgcctgaatctcatcttttcggagatatggtgctacgtcagtcacaaacgggtaatgccaatttttagcattcaaatagcgcaccgtcccaatgtagaacgtatacggaaagccaaaatagatccgcgttaaatctttaatgaaccattcattttcaattgtagcgtaattgtgccccaaaatcgcgtggacttgcatcgctacagctggatcttgcgtattgttgtgcttagtcaatgcgaataattgttgccattttgaagcggataaaagatccggccgataatgctttatttgttttaactgaaccggggcagcattcaaggtatagccaccatcaaacggttcatccaataattggaccgtctgcacaaaatgccccccgagtgagtgacccagtccatagatgattgttgccggattaattcggcgcacccgccggaccacataccgcgtaaaccgccgtgcgagttggagttgctcatcattttcggtattgccaatcagcatcgcatcaatattatacttccaatcttgataactctcacggacataattatccagccgctgcgtaaacgacttaatccgcggatcatccatcgtcccctcagtccccttgtaggaaatgtaggtatacgattggcgattaagcgtgacgtaataggcaactgccgaaaaaccagtttgttccgcattcggcaaaaccgttcgcgcatcatagtgaatcaccgcttccgccgcttgatgcgcgtgaataaacacgaggtacttcacgtaatattgcaattcctgcacgttaaaatactgatctaaataattaagagccatcatgtccattttaaaagcgcggctatcaaatggatcggccagtatcggtcctggcttactcgtggccgccactttatcaggggctatatggtataaataggcgagcgcctgcttcgtcagtaccgtactctcattgattttttcattttgtaaattgataatcagttgtttcaaacgattaatcttgcgttggcggttaaattgcggatttgcttgaacggctgccaaactcgccacatccaatgcctgcagtcgccgtaacttggcccacaaatagggatcggctcccgccgtcgccaataattgatttaatagttttattttacttgttttaagttgttgatagctgaattctagtcggttattgcgccgtaataaggcctgcgattgcgcacggtcaaacgtcaacggcacatctaaatgcgctttgaacaataacttacccatgtcatcgaagacttttgccaaccgaaagagcgtcgagatgatcactgtcgtttccatttgcatcattccttatttttgtaatacttctattataaagtatctgactcaaaaaaactgagacgaaatcgtcccagcttagatggttttgggtttgatgcgcacacctggttcaaacgtgctttttggtcgcaacaacttccgcttaagctaaaatcaccagtaactccaaaaacggattactggtgattttgtcttaatgctcatttgctaaccgcgaccaaacgcactctgttcttaaacgtgcttcagcaggcatatttctgtggctaaccaaatttgccaaattagcgattgcgtcgccaattcggcaaatccagttaatcctaaaaatacgaacgcctgcttacgcactctgttctatgcagtaatttttttgtccacagcttggacacactagttgtcttgtctttggcgtgtgccgggcaaagaacattttacttaggcgtggtttgaagaccgtcttgcaattgggacatagatagacagtttcttgatagtagaatgttgtcacataaatggccatcgcaatgatgaccggtatcccaatccacattggccaccaaattccacttagaaacccaagaattaataagccaatttccacaccatcaatcaataagccccacatcagcattcgccgatgtaatctttttaactgtgttgttttagccattgcgtcttctatgtcgctgattgtcatttcaaaaggcaccgcgctagtattttgaatcgattgcagtacaaactgcaacgccactttctggttagctaagtctgtttctttttggactaactgattgagttgctgttcgactagcaatgtcagtgtatccgtcgaagcttgactcgccatcactttttgaattgccttcagtgaaaagcccagctgcttgtagcctagaatgacttttaacgtctgcacttgcgcatccccatacagccgtcgtccattttcagttaagcttgccggcttcaacaaatcggcctgatcgtaatattgcaccgtccgcaccgaaacatcacataatttagcgagttcacctgttgtatattgcgccatagaatatcacctccataccttgatactagccgatgacgtaacgtcacaagcaagtaaaaaagcattatttgctaaaacttttattcgttctcctttaatgcaccaatcatatcaatcccttttaacttgcgatgggtcatccccatcacaatcagtgaaaatagcaccgtcatccctgccgcaatcaggtagccgctagctggaatgatgagtggaaaggccacttgttctgacgaggccatcgtgatgatgaaccaagtcagcaatttaccgattccaaagccaagcacaatcccaataacggtgaagattacattttctcgcacaatataggccgtcacttctttgtcgaaaaagcccaggactttaatcgttgccaattcacgttcccgctctgaaacgttgatgctagtaaggttgaataagacgacaaacgctaaaaccgctgataacccgatgaaaataaaaacgattgggtctaaattagcactagccgttgcttgcttagccccttgatcactgataaacgttgtggccgccacttccgttgtttgttgcaaacgggtcgccaactgtttttcttgcttggtagtcatcttagcggtgcgcacgagataggcattagccgcaactggttgttgtagcgtttttgaaagagcagattggcggagatagacgctgttaccaaggtagttttcactgatacccgcaacctgaattcgtgcacgctgaccttgtgccgtttgtagcgttaaccaatcgcctttttgaacagcatatgttttagcgaggttcgcagcaataatcgcaccgtgtttcggcaatgtgagtcgttgttgttctcgcggtgtttgcaaagcgacgtactgtgcaagttttgcttgatcagcgaccgcacagactgtcgccgcttgatccgtaatccctttttgcttgaacttaacctgggtcattgtgaccggtaagtaagaccgaaccttctcagtctgtgttaaaatcgacttcgtttgggctgtactattcggtattttaagcgtcacaattgcttggtaatgggtcaattgcttaaactgacggtcagcaacttcgccaattgacgtctttaaaccaaagcctgcaaccattaaaccggtacacccagcgatgcctaagatggtcagaatcatccgtgctttatagcgaaaaagattacgataagttactttttgatggaaactcaatcgccgccagagcggtgtgattctttctaaccaaatccgttggcctggtttcggcgcttttggtcggagtaattgggtgggcttctcgcgtaaatcgcggattaaaacataccccgtggccccaactgtcgcaatcaagaccgctccagtggctaataaaattggaactgtccaaaaatgggttggataatgcgcaaaggtgtagaccggtttttggattcgatagacgactagcggtaataacttcgtgcccaaaatggtgccaagcacggtgccgatactacctgttagtagcgcatatagtaaatacttctgcgcaatttcccaattacgatagcctagtgccttcaatgtcccgatttccttacgattttcttcgatcatccgcgtaatggttgtaaaggtaattagaatcccgattaagaaaaagaagaccggaaagacattccctatcgcatcgatgcgatccgacaagctcgtaaattcattaaaacccggattagcactgcgcgcagttaataagtactgttgctgcggctgagttgtgtgtgcttttaattggcgcatgagctgtgtttctttagtcgcaatgccggtgcgataagcctgtaaaaagctactgtgacgatccaaatcactaaagcgcaccatcatcaccgaatacggttgaggtgcaaatgccttttgtggcaaatacataaagccatctagctgaccatccccgaccggtacggttccacgttcctgacggtcgatatatagcggtgagtccacataaccgaccactttaaaccggtgcgtcaatagctgctgactcttaaccgtcaccctctgccccagacgataatgcgtcttgaccgcgttatccactaaaatttcattcgttcgttgcggatagcgcccggtagtcagcgttaagcgattttgccgtgcagttggttggtaattatataattgtaagttaacatcccgcgcttcatcgcgatacggaatccgataacccaattcagcttggacaccatgcattttttcgaccaccgcacggtcctgttccgttaagccagcggtcccactaatctgtaaatcggatacgcgttgcgtggtgacaaaatgatccacagtctcttctaagttcgggccaatcgatttaatccccacaaacagtaagacacccattaaaataatcaggataatcgcaatgaaccgtccaatcgcctgccgaatatcgcggaatgtggtttgtaaatataaacgtgtctgcatattaaccacctaccattcaatcttttcaactggcaagggattagtgttcacttcaattgaacgcacgcgcgcatcgttaatgtgaatcacgcgatcagccatctgagcaatcgcggcattatgcgtaatcaaaacaacggtccggtgttgttgccgactaacttcttgtaataatttaagaatctgcttgcccgtttcataatcgagtgcgccagttggttcatcacacaagaggagcttcggattcttagcaagcgcccgcgcaatcgccacccgttgttgctccccaccggatagttgggccggaaaattctgaagccgatcctgtagaccaacttgttgcaaaacaagcgcaacatctaaagcattcggcgagacagccgttgccagcgccacattttcttgcgtcgttaaattcggcactaaattgtaaaattggaacacaaacccgacatcagtccggcgaaacgccgtcaattggcgcgcactaaactgcgcaatatcgacaccatcaatcaacacttgcccttcatcgggtgtatccatcccacctaagatgttcagcactgtcgattttcccgcaccactcggtccgagaatcaccgctaactccccttcattgactgtaaaactaatatcatgattggccacgattgttgtctcgcccatctgataccgcttggctacatgtcgtacatcaattaaactcataacgatcactcctatacctatttaaccggttacatttgactagttttattatcgcatatccgagcttgcacgacacaaaaaaaagacaatcagaaaactgattgtcctttaagataagtaccattttttcttaattcaacgtaaagccctgttttttcaaaaaaatcgccactgctggtcgtcgcacttcactaaagaaggccgtattcttggtcgaccaatcagtttgttgctgattggtcccacgattagcataataattttgcatttgttgatcgtattgcactaaattggttgcctgatgcacatcatattgattttgagcgacttgattaacttgcggtaatcgtggtttaacctgatttttagtcttcggaatcccgaccgttaacccaaatagtgggacggtataggcgggcaacccgagtagttcagcgacacgcgcaatgtcattgcgaatcccaccgatataacagatgcctaaatctaacgattcggcagcgactgccatatcctctgctgcaatggctgtgtcgatcgttgcgactaataaggcttccatattttgtatgccagctaatgactggcccgctttttctaagagtgtggcttgtcggtataagtccgcgacgaaaacatagaacgtccccgtctgtttaacgtacgccgcactttgagaaatcgttgcgatttcatcacgaattacgggatcggtcacttcaatgattgaaaatgcctgaacgaaattcgaagaagacccactttgagctgccgcaatgagttgttgtttcactgtcgtgctgaggggtgttggctcgaaatcacgaactgaaacatggtgttgcatttgttcgattaaagatgacatacaaagactccattcgatttaaaataagttgcttctagcatagcgcgttaacacaaaaagggctagcgcaaaattgccctagcccaaaaacgtgctttttgaaactggctcctgtgcttaactacaaaataagcactatggcaaggaccgccatagtgcttatttttaggttaatgctcagaaccaaaccgtttcaaacgcactttgtttgaaacgtgctttttggttgcaacaacttccgcttaagctaaaatccgcagtactcctaaaacctggattactgcggattttgtcttaatgctcagttgctaaccgcaaccaaacgcactctttaccagtggatttcgttaaaaatctttggccctttgcgcatctttgtccgatcatttttagcaacgtcggtctgttttgatctgccgccaccttttttctgatcaattagtgcttgcattttttctttttgcgttaattttggtgtttgtttttcactcatcttctgactcctaacttttctacattctataagattagcatagaattcaaagaatgcctaaccgttattttgtagggccggaatcaagcgctccgtcacttctcgtacagaaaacgggttttgccccgtaatcaactgaccatcctggacagtaaatggtttgtaaaaccgtttttgcacaaattgcgcgccgttttgagttgccacttcttggtttaaaaatggcaccacttttttcttgcccgcaataatttcttctgcagtggtaaacccagtcacttttttaccagcaatcagatactgaccgtcatcatttttaatgcgtagtaaacccgcgatcccgtgacaaacggacgcaagatagccactgtgattataaatttcccgggcaattgcttgtaattctggattatcaggaaaatcccacatcacgccatggccgcccgtatagtaaatcgcagcgtaatcagctggattgatatcgcttggcttgagcgttgcgactaacccccgttgcacgtaatccggttgttcatagatggtcagaattgattcatccgtgtacttcatcccccgtggatcaagcgggacaaagccgcctttaggactgacaaaatcgtaatcaatccccgctttttgcagttcatcaacgaactctgcggattcccccagccataatccggttggatcggtggttccttgataacgcgtaacattcgtatggacaattagtactttgggcatctggttagcctccctaaaaattagtgatgtgggtttattaaatcgttttgttcttattctgtcaattgaaaaataactacttacgtcgtaacaatccaaatagcgttctgaattgatttttaaatgaaacaacatcattgaagatgtcttcgccgtcgttcaacatcttgaccgttaaccagccgagcgcttcggtaatcgacatcgcaacggtcgcattgaccgcggctccggtgaccgttccaacgaccggtatcagttttagaatgttaccgactgcactccgacctaggccaacgagtaccaattctttcgacaggctcttgcccaaactagccgaccaagattgaccgaatagtttatgcaaacgcgccatcatcgttaattgaaccggcaccaacaagaacgcatcggaaaatggaattggtgaacagccaataatcgctgctgttagtgatgctgcgtgaatgatattgtgtgcctttttacgcatctgatcatccacaccgactaggaagtcttcaaagaccccatcaaactgtgtccgactcttcgccatcgtcttttccgccaatgctttggattggttaaaagacttcgcaatcacagctgccgattgttgcggcaacttctttaagacttccgcaaagaaggaatcaaattccggatttggttcaccattcacttgttgcttattaaaaggtttcttcatcatgccacgctccttatctgattgactaacatcgctactttaaagcgattatataatattgaacaacagttagtctatcgagcgaaaggctgactttttaaagaatctcctgaaccccttcttcaatcgtcgtcaccttaaattctgggaaccgtttcttaaacttgtctgaactgaacaggttatcttcttcatatctaggtaggagttcttttaattcctttagcggtttgctgaaccagctaccgatgttgaactgccacatttttaaaacggtgtagtcgattggttgatgcgttaaggtgcctgctagcgcgatgatttcggcgtatgttttaccgtcatcacaagggaggtgccacgtttgaccaaacgcatccagcgtattgccaatcaacgccatcgcacgactagcatctggcgtccaaattaatgtccgaaccgcttgatcattcaatggcacgcgcacctttttgcccgccttgatattgttaaagaccattgtgttcgtaatgctttgcgtcttgcctgggccataaaattcagatgcacgacaaatgaccgcttcaattgcgccagttgccatcttatcaagtaacaactgtgcgatctccgctcggacaaccgctttgcggccaacgggttcaaaaggactcgcttctgtctggagcgtgctatttttcgcatacatataggtattatcgaaaaagacgagcttggccttgtgcgcgacgcacgcgttaatcacgttagtcatcataatgtgaaattgtgcttcccacatgtctgaattcatcggtaagccagcggtaaaataaacaatttcactgcctgcaaccgcacgatcagtttgggcggcgtcgagcaagtttgctggaaatagttgatcgttcgcgttcactttttttggattccgactgaccagtcgaatgtccgttgtgaagtccttatgaagtgccttggctaactcttggccaatctgaccgctactacctaagatggtttgcattttaaaaactccttttactgttgtttttcgatgactgccgtaatctgatccagcagtgtttttagttgattgatttcgcccagttcgtgttgcaagtaataatagttcttcgtgccttcgcgtctaaagtcgaccaagttggcttccttcaacactttcaaatgatgcgacactgccgggcgcgacaagtccgacgccgccattaaatccgtgacctgtaagccatcacaagctttatcagccatcaattctaaaataatactctgccgcttctcatccccaagcgccgtcaaaaacgggctcagctcagcaaagctctgtttaataaccttcatttcatccatacattaatctccggttttattttaatggttcataagtttaaaccattaaaccattgatgtgaatttttgtcaacaacttcaaatcaatgcaacaaaaaaagcctcactcattaactgagtgaggtcattttattaatgattcccttgtgtaatggttgtaatactccccatatcatatcgatgtcgtgtggttgagtattcaaaaggcagcccgttttgtagaaagactgtctgggtaacttgtaagacaggttcgactggtttgcagtgcaggtattcttgatccatttgattcggttgatcggcactaattcgccggtaagccacgccaatctttagatgcaatgtttgttccaagtattcgtagatcgacttcttaagtactgcgtctgttaattcccctaaaatcttagccggcatgatcgaatgctcaatactatagggtacttcgtttaaaaaccggagtcgaacaacgtcatagaccgcttctgttttagctaactgaagcttttcttgttcttctgcatccggtaatcgcaattcattctttagaatgtcactctttactgtggcctttccggcaaacagcttagtcgtccctacatattgattcacagtcgcatctaattgtgatagcgcggagacgtttgatttgataaacgtaccgcgcccttgttcactataaatgagcccttcataagttagcatttcgagtgctttttgaatggtcattctcgatgtttcgaattcttgggctaacttcttctgttcaggaagcggaccatcagctgaatattgtccttctaaaattcgggtgcgaatcgttgtcgcaatatccttatactttgccatagtaaccacctaccatttgatatggttattatagcatattcagattcggaatattcgttgttcaaattataaaatatgactttacaagttacattaaaagcgctatcataaaatcattcaagtgatggaggtaccatgatgacgttagacaaacattttttatggggtaattctgtatcaagtatgcaaagtgaaggtgcctgggatgctgatggtaaaggtttatcagtgtacgatgtgaaacctgagacagctgatttatcggattggaaagtgggaattgatgaattccaccgttatcaagaagatatcgatttaatgcaacagatgggtatgaactgctatcgtttccaaatttcatggacgcgcattttcccaaatggtgatggtgaaattaatttagcgggattcgattattatgatcgattgatatcagctttgctcaaagcgggcatcgaaccgatgatttgcctgtaccattttgacatgcctttgcatcttgctgaaaaatataatggtttctcaagtcggtatgtcacacaagtattcactaagttcgctaaggctgtcattgaccgttatggtggacaagtcaaatattggctaagctttaatgaacaaaatggttttttctttgaacctggctttgataatactggctttatcaacggagagcgcgacttattaaccctttatacgatcgctaataatacaatggttgcgcatgctgaaatcgccaattacttacacgcccactaccctaatgaccaaattggtgggatgttagcctatcaagaattctatcctgcaaccagtcatccccaagatatctttgctgctagaaaagcatcagaatttatcaaccaacatttcgttgacgcctttacaaaaggtcactattcagccgaagtactgcaatatatgcaaaatcatgacttaatgagcagtattcagcctggtgatttagcgctcattgcaagtcatcacaacgacttcttagcgttcagttactactacactgtcgcactcgatcacacaaaattaacacccaacacaccacccaattattacatgcgcgatgcgagtgtccctaatccttatttagaaagtagcgaatggggctggcagattgatgccctcggttttagaaacgtcttaacaaaactttcgaatgaaactggcctccccatcttccccatcgaaaacgggattggcattcgcgaagaatcgctgaatcatgaaatgattcaagatgacgaacggattgcctatcaccgcgaccatatccaggctttgaaagacgcagttgatgaagacggcgctcacgttgtgggctatcttggttgggggttaatcgacatcccaagttcaaaaggtgatatgaataaacgctatggcgtcgtttatgtcaatcgaaccaatcacgacctcaaagaccttgctagaattccgaaggctagtttttattggctgcaaaaagtcattcaatctaacggtgaacaattagactaaaaaaagtgcgttaaaaggagtgttttctatgcttaaacaaggaagtcggcgacaaagatttattgatcagtttacaaatatcgcctttaaaatcgggaatcaagtgcatttgcgttcattacgtgatgccttcgcgattattatgccactattcatcctcgccggaattggggtgctcgtgaataacgttgtattcccttgggtcctccacggccaaatgctaaccaactttcaatacttcggcacttacattaccaatgggactttgaacgttgctgggctattactcgcacctacaatcggctactgtttagcgcgtaataagaattacgtcaacaaaatttccgcggctgtcatggcactagggactttaatcatcatgatgcctaatactgttccggtcacaccactagctgccaaaaaagccgtcgaagtttctggcgtcttaactttccaaaacgtgggaacaaccggaatgtttgccggcattattattggtttagtcgcaacagaactctttatgactctttcaaagcttaaaaaattacagattaacttgagtgatgccgtcccatcagctgttgctggttccttcaacacaatgattccagccctcattacagtgagtctttttgcggcacttgctgcgattttaacggctggtttccacactgatctcatcactttaattacaaatgtgattcaagaaccacttcggcgcgttaatacaagtttaccgggtctccttttgatttacgggactggtaatctcctcttctcatttgggatccatcaagctgtcattaacggtactttattggatccagtcttactgatcaacatgaacaaaaatatggcagcttacgcagctggtcaacacatcccttatatcatcaacaacgttttccgcgatacatttgggatgcttggtggtaccggtagtactatttgtttattgattgcgaccttgctcttctcaaaatcacgcgctagtcgtgatattacaaagctatcattcgtcccaagtttatttaacattaacgaacctgttatttttcggttatccaattgtcttcaactttgcgctcatcattccatttgtcctaatgccaggacttggcatcagtattgcctacttcttcaccgcaattggctggatgaatcgagtagtcgtcatggtaccttggaccacaccaccattactcaactcctatttagcaaccggcggcgattggcgcgcccctgtgattcaaggcttcactttaatcctcggcgttctaatctactggccattcctgaagattagtgaacgcgttgcggccaaacaagctgaattaacgcaataattaaaaaaaagaattcagaattttcgttagaaaattttgaattcttttttgttttaccgatgatcttaacctcccctggtcttataaatccggattaggcgtaatcacttgcaacttatgttctaagagtcgcatctccaatggtgacttggcactcggatcaccatcaatgcgggtttgtgcactttgctgattgtcgactgtgatgctgatttcattcgctttaaagtaagtcatcccgggaatcttcttaaaattacccgttaagaaataagggagaaacatcactgaccgtgctagcgacattttcggcgcaacgaagacatggaaataaccatcatcgggttgcgcttcgggattgaagttggtaaatccaccaacggaattcgtgagggtcaccagcaagaattgcgtgtctttttgccagtgccgatcaggcgtttcaatcgttagcggataatgctgatgctccgctaatgcatggatgcctttgcttaaaaaagctagcggcccccatttttgtttttcactctgagtcacgttcaacgcggcgtccgccaaaatgcccaatgtcattgtactaatcaagtaatcatcgttcacttggccgacgtcgagtgggcgcagatgaacctgctgcagattttcaatcgcttgatcaatgtccaacgggatttgtaacatccgcgccaaattattcacggtcccagcaggtacaatgcctaaataaggcggctgatctaacgtcgcaagaccactaacgacttcattaatggtcccatccccgccgacagcgaccaccacatcaaagcctgcccgcgccgcttttttagctaaccgcgttgcatctttcggcccttccgtcggcatcagttcgaccttgtgttgattcttgatgagtgcctgctcaattttctgaccaaccgactcaccattgttgtgcccagagtggggattataaataacggcataacgatacataaaaaagcctccttcaattactctaagcatagcaaaaatattgggaataggctgggatggcgcattaggcttacacttaaaaagtctgatggtgtcaaaaacaaaaaaacaccccgcaatataaaattgcgaggtacttgtaaacattgatataaaagtgatattaacgtttactgaattgtgaagctttacgagctttcttaagacctggtttcttacgttccttcatacgagggtcacgtgttaacatgccagcgctcttaagagctggacggaagtcagggtcaactgtcaatagggcacgtgaaataccgtgacggattgcaccagcttggcctgagaatccaccaccattaacgtttaccaagatatcatagctatctgttgtttcagtaattgttaaaggttgtttcatatctaaaatcaagttagcaaatggaatgtaatcaacaacgtctttgttgttgatagtgattttaccagtacctggtactaaacgtacacgagctactgagtttttacgacggcctgtaccgttataagttacttgagccactatagtttcctccttaaataatgtccgtaatgtctaagacttctggattttgtgcttggtgtttgtgttcgccaccagcgtatacgtgtaacttcaagaattggttgtgacctaatgagttcttaggtaacatccctttaactgacatttcaattaaacgttctgggttgttttcacgaatttcgccagcagtccgagttttcaaaccaccaggatggttactatggtgatgatataacttgtcggttgctttgcgacctgttaatttaattttttcagcgttgatgacgatgatgttatcacctgtatcaacgttaggtgtaaatgttggtttatttttaccgcgtaagatagaagcgactacagttgatagacgacctaatgcaatatcagttgcatcgatcacataccatttacgttctacttcgcctggtttagccatgtaagttgtacgcacgatttattcctccaatattctgtgtttgtttgacactcaataagtttccggggcctatcgtggggcaaacaataccagatactatagtatcgtaatttcacgattaagtcaattgaatctcaattattttcatcagtttcgtaataaacttttttaaggtacaaaccgcttgctggcgcggttgagcgagcttgttgacggtccttaacttcatacagccgtaaaaaatcgtggacatcccgccgaccgttaccaatttctaataaagttccgaccaagatccgcaccatgttatacaaaaagccgttcccataaaactcaaaaacgagttcattttcgggttcattgaaaacaacggtcgcatcataaatcgtccgcaccttatccttaatgaccccacctgaagccgcaaaactcgtataatcatgcgtgcccatcacatctggcagcgccgcttgaatccgttccacatcgattggatacggataatgaccggtataacgtcgcttgaatggattcgtataatgcccaagatcgacccgatacatataccgtttaccgaccgttgaaaatcgtgcatgaaagtcatcatccgctaactgactatccacaacctccatatcaagcggtaagaggctatttaaggcccgtaacatactaatagcgggtaattgacctggatagtcgaaatggaccacctgccccgttgcatggacacctgcgtccgtccgccctgaaccatacacttgaatataagcacccttactcatctttgtcagtgctttttctaatgtgccctgtactgttcgttggttcggttgcacttggaaacccgcaaaatccgttccatcataggcaattgttacgcgataccgttgtgtcattttatccctcttgtgttaaaaagttagtagttctattctaaataattttctgaaaagtagcaatctttttatgaatgttcgtaaaaaatttgatttaaaaatgcatttttaatataaaacaagttcaaatgctgtataattattattataagtagaaataaggagaattgtgcaatgaagttcggatacgcacgcgtttcatctgccggacaaagtctagcaacccagattagtcaattaaaggaagaaagctgtgacattatctacagcgaaaagtttaccggaactaccgttgatcgccctaatttaatgaactattagatcgggtttcaagtggtgataccatcgttgttacaaaacttgatcgcttcgcaagaaataccaaagaagcacttgaaatcatccaagaactttttaaagcccgcattaaaattcatattttgaacatgggcatcattgaagacaccccttccggacgactcatttttaccttatttagtgcttttgcgcaatttgagcgcgatatgattctcactcgtacccaggaagggaaacataatgctcgtgtcaccaaccctagttacactgaaggtcgtaaaacgacctatactgatgatgaacatacaagcagccctagacatgcgtgaagagggctttacgtacgctcaaattagttaccaaactggcattagtgcttcaacgttgaaacgtcggttcaaaaaacaagctaatcaaaaaagtgcaaaaaaaaaggactcagctaaatcaacctccgttggtttaactgagtcctttttgcgttatcttaagaataaaagtgcgacggttaaaaggcccatcgtgataaatgccacggtgtctcttgtccgccatttcaaaattcggtacttactgcggccttcgccaccttggtacccccgtgcttccattgccgttgctaaatcatccgcgcggttaaaactgctgacaaataacggaattaaaatcggcacgattgctttcatttgttggaataaattcccttcaccaaaatcaaccccacgcgcacgttgcgcatccataatcttagtggtttcatccatcaatgttggtacaaagcgcaatgcaattgatagcatcaatgcaacttcatacactggaaaatggactactttaagcggcttgagaattgattcaatcgcatccgctaacgacaatggcggcgtcgtcaatgtcaggagagtcgacatgaaaataatcaatataaagcgcatgaagatgtagacgccattaatcagcccgtactgggtaagcgtcagaaatccccactgccaatagacatgaccaccacgggtgaagaaaatctgtaagagcactgtaaatagaattagccataacagcggcttaactcctttaataaagaagtcgagtttaatttttgaaatcccgattagcgctaacgtaaagaccagtaataaaacataggcttgccatgtacgcgctaaaaagatgatcccaatataataaaaactggctaataacttcgcccgtggatccatccggtgtaacactgaatcaccggggatatatcggcccagaattaatttattcatgtccaatccccgccttcttcggtagttgttccgctaataaggcggccaattcatgttcggttagtggtacttgatcaaagacaaagccttgtcgcattaaagcttgcgcgaactgagtcgttgttggtaagccaagttgtttttccgttaaccaatccggatccgcaaaaatttcgcgtggtgctccggtcttagctagcttgccatgttccaaaacgataacgttgtcggcgtagttcgccacatcatccatctgatgggtgaccatcacaatcgtcatcccctgctcactgtgtaacttttcaaaaagcgccatcatctcacgccggccaactggatcgagccccgcggttggttcatctaagaccaatacttccggtttcattgccaacacaccagcaatggcaacgcggcgcatttgcccaccagataaatcaaaaggtgacttgtcaatcacattagcgggtaaaccgacgagttcaatcatctctttagcgcgttcaagtgcttcagcttcagggacaccgaagttctgcggaccaaaagcaatatctttttgcaccgtcgactcaaataattggctttcaggaaattgaaaaaccatcccaactttttgacgaacagcctttaagtttttgttgttggtctcaggcgtgatttcgcgctcaccaatctgaacaacgccgctcgttggttttaagagtgcattgaggtgttggagcaatgtcgacttgccactacctgtatgaccaatcaaagccgtataggagccacttggaatggtcacattgatattttctagcccaatcccttgaaaaggcgtgcctggctgataagtgtagcttacatttttgaatgtaatgtccataagtactcaaccatcctttccgttgtgagataatctgtgggcatctcgatagcgcgttcatttagcgctgctttaagtttttctggatatggaacatctagccctaaatcaagcaaacgttgcccatatgcaaaaatatcggccggtgtgccctgatcatgcacttgccccttatctaagataatgatccggtccgcacttgcggcttcgtcaatatcgtgggtaattgatagcacggtcatgtttgtttcttgttttaacttatgaatggttgcgagaacttcttcgcgcccttttggatctagcatactggtggcctcatcgagaatcagaatctcaggttgttgtgcgatgatccctgctaaggccactcgttgtttttggccacccgacaaacggcttggttcacgtttcaagtattcactcataccaacacgttcaaccgcgtctttaacccgttcaatcatttcagctcgcggaatcccctgattttcgagaccaaaagcaacatcgtcttcaaccgttacaccgacaaattgattatccggattctgaaaaaccatgccaattttctggcgaatagtccacacgttatccaacgacaatggtaacccatcaatcgtcactgatcccgattgtaaatctaacaaaccgttcaatgatttcgcgaaggtactcttaccactaccgttatgaccgataatggcgacccattcgccggcattgatactgacagaaagatcattcagtgctaaatgtccttcagattgtgggtattcatattttaaatgttcaacttgaattattttttgctcattcatgattaataacccgtattttccttggaattaaagtgcattggttatgttatccatgcacgtttcaaatcaaaaacctgttcctattttatcatataaaaggccatagcgctttcgttagtcaccctttattcaaaggatatccaacacaaaaaacgtctaactccgatttaactcggaattagacgttattttatgtaaatcatcaatcgatgaaagccatactgtgttgctagtatgaccttaggactagactcggagtacttccatcatcataacgccctgtctcatcgatcaaatgacctaaatcattttgtgattaaacaagttcaataatcaccattaatgcaccgtcaccacgacgaggggctgttttaagaatacgtgtgtaaccaccatttctttcagcataacgtggagcaatgtcactaaataatttttgtaaagcagattgaacgattacagcatcgtcttcttcgcgaatatcagctacttcgttacgaacgaatgctgcagcttgacgacgagcgtgtaaatcaccgcgtttacctaaagtgatcattttttcagttgttttacgaatttctttggcacgagcttctgtagtaatgatacgttcattgatgattaaatcagttgtcaaatcacgtaacattgccttacgttgtgagcttgtgcgacctaatttacgataactcatgaatggagtccctccttcttatcagtttattcttctgtgcgtaagcctaagccaagatcaaataacttgttcttaacttcttctaacgacttgcgaccaagatttctaactttcatcatatctgcttctgatttgtcagttaactcttgaacagtgttgattccagcgcgtttcaaacagttgtatgaacgaactgataaatctaactcttcaattgtcatttcaagcattttctctttatgtgtctcttctttttcgaccatgatttcagcatttttcgcttcatcagtaagatctacaaagattgccaaatgctctgtcataatcttcgcagctaagctaatagcttctctaggactgatggaaccgtttgtccaaacatcaagtgttaacttgtcgaaatcgttacgacgaccaacacgtgtactttctacttgatagttgacacgactgattggggtataaattgagtcgattggcaaaacaccaattggcatatcgtctgacttgttttgatcagcagcaacataaccacggccttttttaactgtcattcgcacgtggaaattgccgccttcagctactgtacaaatatattgatcagtatttaagacttcaacgtcatcatcagaaatgatatcagcagcagtaactgttgccggacccttaacatcgatttcaattgtcttgtcttcttcaacatgcaatttaagtgctaattttttaatattcaagatgatttgtgttacgtcttctaggacgccatcaattgttgaaaattcatgtaaaacaccatcaatttgaatatctgtgacagcagtacctggtaaagaagcgagtaaaatacgacgtaaagagttacctaaagtcgtaccatagccacgttcaagtggttctacaacgaacttaccgtagttagtactttcatcaacctttgtaatgtttggtttttcaaattcgatcattcttatcttttacccctttcaaaacgagaagtgtttatacgtgaacacgtttcagtttgtctcaaaatgaagcgtagcccagactaaacacgacggcgttttggaggacgagatccattatgaggaactggtgtaacgtcacgaatagcagtaacttctaaaccagttgcttgtaatgagcgaattgcagcttcacggccagaacctggtcctttaacagcaacttcaacagatttcataccatgttccatggcttctttaccagcagcttctgcagccatttgagcagcaaaaggtgttgacttacgactacctttgaaacctaatgaaccagcagatgaccatgcaacagcattcccatgaggatcagtgatcatcacaagagtattgttaaatgttgagtgaatatgtgcaacgccggcttcgatatttttcttcacacgacgcttacgtggagcatttttcttgtttgccataaattataacctccttttactgattatttcttcttgcctgcaatcgtaactttcttacctttacgagtacgtgcgttgttcttcgtgttttgaccacgaactggtaatccacgacgatgacgcatgccacgataagaaccgatttcttgtagacgtttgatgtttaagctaacttcacgacgaagatcgccttcaactttaactttgtcgattgctgcacggatcttgtcttcttgatccggcgttaaatcacgagtacggacgtcttctgcgacgccagcatcagccaagactttaacggcagttgtatttccgataccgaaaatataagttaaagcaatcacaatttgtttatcacgtggtaaatccacacctgcgatacgtgccattcttgcacctcctgcttaattaatattaaccttgacgttgtttatgttttgggttagctgcgcagataatcataacgcggccttttcgtttgataactttacaatgttcgcacattggttttactgatggtcttactttcatatcgactgacctccttgatatgatccttacgcctatttaaagcgatacgtaattcgtcccttagtcaaatcatagggtgacaattcaactgtcacacggtctccaggtaaaatcttgatgtagttcttacggattttaccagaaacgtgtgccagaataactgcaccattttcaagttctactttaaacattgcatttggtaaagtatcagttactttaccttcaatttcaatgacgtcatcttttgccacgcaaaagtacccccttgtggttgtgaaaattcatacagaaaaatggtgagagctctccgcactcaccgctagtggtcataccgagatattatatcacaagtattaaatttttaaaagcactgagaattctgtcattaaacaactagtcaggcttttacgtgaacaatgaccgtgagatcacttgagttgatgactagtctttaatggtatcaagtactttttgaacggcagagaacacatcatcaatttcttgattcccatccaccgtgtaaagtaggttacgtttttcataataatcaagtaaaggtgtattcatttcgatattgacctttaagcgattcttaaccgtttcaggtttgtcgtcttctcgttggaagaaaacatgttcgccgcaacgatcacatgtaccttccactttagttggatggtaaagtttgtggtacgttgcaccacaatttttacaaataaagcggccagataaacgatcagccaagatttcaggatcaacatcaatgttaatcacaccatctaaaggtttgttcaatttatcagtaatggcagctaaagcatccgcctgatcaagagtccgaggaaaaccatcaaggagataacctacattagtatctgcttgtgcaagacgttcctcaacaattccgttggtcacatcatctggtaccaattcacctttatcgatgaatgacttagctttaaccccaagttctgtttgatctgccatagcagctctgaacatgtcaccagttgaaatgtgtggaatatgataagcgtcaacaatcttttcagcttgcgttcccttaccagcgccgggaagtcccattaacatgagattcatgcctttgcctcctatttaaaaccaggattcaatactttttaaacgataattgcttatcgaatgaatccaacatacttgcgtttcataagtaacccttcgagttgacgtgtgctttcaagcgcaacaccaacaacgattagtaaactcgtcccacccaaaccaattgattggggtaagccaccgaggtttgctgctaattgtggtaataatgcaattaccccaaggaacaacgcaccgacagttgaaagacgcattaatacgctagaaagatacttctcggtacctttacctggccaaacacctgggatataactcccttgcttagtcaagttctccgcaactttttcagggttaacctgaacaaaagcatagaagaaggtaaagagaacaatgagcaccgtataaacaatcgaacctgtcacagtctgcatgctgaagatatctgataatactttaaaccaagtatctgcaccatgacctgattggaaggccattaagattgtttgaggtgtcataataaatgaactggcgaagataaccggaatcacaccagcgacgttaactttaaggggtaggtaactattttcacctgcaccagcttcacgacgcgtatattgaatcggaatctttcgatttgcttgttggacccatgtcacaaatgtgacaatcacgagtactgcaataatcaaaccgatgatgaataagacacctttccacatatcgccttttgaagcgttcaagacttgttcgcggaagatttggtaaagaccgcttggaaggcgtgcaatgatccctgcaaagatgatcattgacacaccattccctaagcctttatccgttatctgttcacccaaccatgtaattaacatcgtaccacccgttaaaatgatcccgatgctaacgaaggtcttaatccccggatctttaaccaagcccatttgactgagtgagttaaagccagcggtaatccctatcgattggataaacgctaagatgatggttaagtaacgcgttacttggttaagcttacgtcgcccaacttcaccttgcttgctccattcaacaaacttaggcacaatatccatttgtagtaattgaaccacaatttgggcagtgatgaatggtgaaacccccatcgagaagatggaatagttcgccaagccaccaccacttacggtatcaagcaatgggatcaaaccagttgaacccaacttagtcaatgcaccagcattcacacctggtaccgtaatttgtgcacctaaacgataaacgatcaaaacgcctaaagtaaacaaaatcttactacggatttcctttactttaaatgcgtttttgagtgtctttagcaattaaatcacctcaattgaaccgccagcagcttctacagcagcttttgcagcttcagaatacttgcttaccttaatgttcaattttttgtttaattcaccattcgctaataatttaacacctgataattcattcttaacaacgcctgcttcgattaaaacagttgaagtaatttctgcaccgtcttcaaaacgatttaaatcgtttaagttgacaacagcatattccttacggttgatattcttgaatccacgttttggcatacgacggaataaaggcatttgtccaccttcaaatcctaaacgtactttactacgagctttttggcctttttgaccacgaccagcagttttaccagtacctgaagaagtaccacggccgacacgtttacgaacgtcacgagcaccttcgttaggtttcatttcatgtaatttcattattgtgcgcacctccttgcaatatatgttgaaattagtctttaatttcttcgactgttactaaatgtgcgagtttgaaaatcacaccgcgagttgcagcatcatctggtttgattacagaactatttactcggttcaagccaaattctttgaccattttacgttgttctggaagacgatgagcagcactttttcttaaagtaatctttaatttagccatgttcagttatcctcctagttttgtaagctttctacagatacattacgtaattctgcaatttcttcagcagtcttcatacgagttaaaccgtcaattgtggcacggataacattgatagcagttttgctacctaatgttttacttgtcacatcatcgattcctgctaattccatgacggcacgaacagcaccaccggcagcaataccagaaccttcaacagctggttttaatagaacacgaccagcgccgaagcgaccaataatttcatgaggtaatgttgttccgaccttaggaacattgataagattctttttagcgtcttcaacggctttacggatagcttcaggaacttcttgtgctttacctgtcccgaaacctacgtgaccgtctttatcaccaacgattacgattgctgcgaaacgtagacgacgtccacctttaacaacttttgtaacacggttgattgaaacaacgcgatcttctaaatctaaatgagttggatcaatgtaagtcataaatggttttcctccttattagaattctagtccgttttcacgagcagctgtagctaaagcttcgatacgaccgtggtataagtaaccgccacgatcaaaaacaacaactttatggccggctttaacagcgcgttgtgcaactaatgcgccaacttgttgtgcttgttctactttagtaccttctgcttttacttctttatctaatgttgaggcacttgctagcgtcacacccgctacgtcatcaataagttgagcgtagatgtttttgttagaacggaaaacgttcaagcgtgggcagtcagcagtaccagagatcttgccacgaacgcgtgtatggcgtttttgacgtgtcttattcttgtctggttttgtaatcacaattttcacctcttaatatcgtttaacagctcaggctgctttatttaccagttttaccttctttacggcgaacatattcatcagtataacgaatacctttacctttgtaaggttctggaggacgaacatcacggatttcagctgcgaattggccaacttgttgtttgctaataccgctgatgatgatgtttgtgtttgatgggacttcgactgtaacaccttctggggcttccatttcaactggatgtgaatacccaacgttcaatactaaagtcttgcctttcaattgagcacggtaaccaacaccgataagatccaatgtcttcttgaaaccttccgttacgcccaagatcatgttgtttaagttagcacgcatagtaccgtgcattgcacgatcactttcactattacgtgtaaagttgataaggttaccttcttcgtgcatttcaatcactggactgaaatgacgtgttagttcacctttaggtcccttaactgtgatgttttcaccgtctttagtaacggtaacacctgcaggaacttcgattacttttaatccgatacgactcacgttatgacacctccttattttaagtttagattaccaaacgtatgcgagaacttcgccgccggcagccttttcacgagcttctttgtcagttacgacaccgttgcttgttgagataattgcgatgcctaagccgtttaataccttaggaacatcattagctttaacgtaattacgtaaaccaggttttgaaatccgtttcaaaccagagataacacgttcgttattcttaccatatttcaagaatacacggatgataccttgtttgtcgtcttcaatcacttcgtaatcgcggataaagccttcgcgtttcaaaatttcagaaatttcttttttcatacgtgaagcagggacttctaatgattcgtgatgtaccatgttggcattacgaatacgtgttagatagtctgcgattggatctgtcatgaccatgtggaattaacctccttattgactctttataattaccagcttgcttttttcatgcctggaatttggcccttatgagctaattcacggaggcaaacccggcaaagcttaaacttacgatatacagaatgtggacgtccacaacgttcgcaacgtgaatattcttgtgttgaaaattttgctggacgatgattctttacaactaaagattttttagccaagaaattgacctccctttttatttagcaaatggcatgccaaattgtgttaacaattcgcgtgcttcttcgtcagtatttgaagttgttacaataacaacatccaaaccacgaacgcgatctaccttatcataatcgatttcagggaagatcaattgttcgcgtacacctaatgtataattaccgcgaccatcgaatgattttgcactaacaccgtgaaaatcacgaacacgaggtaaagatacgttaactaatttatctaagaaatcgtacattctttcgccacgtaaagttactttagcgccgattggcataccttcacgtaaacggaaaccagcgattgatttcttagcttttgtgattaatggtttttgaccagcaatcaaacctaattcttcaacagctttatccaaattcttagcgtttgaaacagcatcaccaacacccatgttaagtacgatcttttcgatcttaggtacttgcatgcttgatgtgtagttgaacttttcgatcaacgctggtgtcatttctttaacatatttttcttttaaacggttagtcatgtaaaaagtgcctcctttccccaaaagattatttatcgattgattctccagttttctttgaaacgcgtactttcttaccatcaatcactttgaaacctacacgagtagcttcgttgtttgatggatcaattagcataacgtttgaagcatcgatacttgcctctgtgtcaacaatcccaccattagggttttgagcatttggcttaacatgctttttaatggtattgataccttcaacaacaacacggccttctttaggcatagctttgatgattgtaccttctttacctttatctttaccactgattactttaactttatcaccagttttaacgaacattgatatacgcacctccttggttgtctgtaattatagaacttcaggcgctaaggaaacgatcttcatgaaatcactgtcacgcaattcacgtgcaactggcccgaagatacgtgttccttttggagtcttgtcatcattgatgataacagcagcgttttcgtcgaacttgatgtaagaaccgtctgcacgacgagcacctgacttagtacgaacgataacagctttgacaacttcaccttttttgacaacgccacctggtgttgcctgtttaattgttgcaacgataacatcaccgatgttagcagtcttgcgacctgaaccacccaaaactttaatagttaaaatttcgcgggcaccggagttatcagcaaccttaagacgactttctgattgaatcacttataggtcctccttccgtcacttatatatatattgagtaacgatttagataataactgctttttcaacgacatctaataaacggaaccgttttgtacgtgacaaaggacgagtttccataacacgcacaacgtcgccaacttttgcttcgttgttgtcatcttgtgcataatatttctttgaatatctaacacgtttaccatattcaggatgtgttttataagtttcaaccacgacagtaattgttttatccattttgtctgaaacaacacggccttggtacactttacgatggttacgactttcttcgctcaaagtaaatagctcctttccatttattatttgttaagttcttgttgacgtaatacagttttaatccgtgcaatgttctgacgaacttgctttaagcgggcggtattttctaattgaccggtagcttgttggaaacgaagattgaataattcttctttgtattggtgttctttttcaagcatttcagcagtggttaattcaataatatctttagccttcatttgactcgccacctacttcctcgcgttttacgatcttagttttaactggcaatttatgtgatgccaagcgtaatgcttcacgagcaacttcttcagaaacgccgccgatttcaaacatgactttttcacgttttactacagcaacccatccagcaggagcacccttacctgaacccattcgaacgccgacaccttttgcagtgtatgatttgtgagggaaaattttaatccacactttcccaccacgtttcatgtaacgagtcatggcaacacgagcagcttcgatttgacggttggtaatccaacttgattctaaagcttgtagcccgaattcaccaaaagtgacttctttgccaccttttgcagcaccgcgcatcttcccacggaattcacgacgatgttttacacgtttaggtactaacatgtttatttccctcctttcgtattgttgttggctttagcgggtaatacttcgccccgataaatccaagtcttaactcctaatttaccgtaagtagtcatggcttcgtcccatgaataatcgatgtctgcacgtagcgtatgcaaaggaacagttccttgagcatgtgtttcgacacgagacatgtcagcaccgttcaaacggccggcaacttgagttttaatacccttagcaccagcgcgcattgtacgttgcatagcttggcgttgagcgcgacggaaagcaacacgtgcttccaattgacgagcaatgccttcacctactaagtgagcgtctaaatcaggtttcttgatttccacaatgttgatgtgtactttcttacctgttaagttgtttaattctttacgtagattttctacttcagaaccgcctttaccgatgaccataccaggtttagcagtatggattgaaacgttcacgcgatttgcagcgcgttcgatttcaatagtagagacagatgcgtcagctaattttgtgttgatatatttacgaatcttaagatcttcgtgtaagaatgttgcgaaatctttttctgcataccatttagcgtcccaatcacggatgacgccaacacgaaaaccggttggattaatcttttgacccacgcgatatccctccttatgcttctttttctgatacaactacagtgatgtgacttgtacgtttgttgattggtgatgctgagcctttagcgcgaggacgaaaacgtttcaatgttggtccttcgttagcataagcttctgtaacgaccaagttttctgcatctaagtcgtaattatgttctgcattagcgatagctgatttcaaaactttgattacgactggtgaagcagctcttggtgtaaattctaagattgcaattgcttctgcaacgctcttgcctctaatcaagtcgactaccatccgtactttacgggctgccatccgaactgattttgcgctagctgttgcactagtaatttgatctgccattgagattcatcctcctttctagcgtgcttttgttttcttatcgtcatttccatgaccatggaaagttcttgttggtacgaattcacctaatttatggcctaccatatcgtctgagatgaaaacgggaacgtgtttccgtccgtcataaacagcgattgtgtagccaataaagctagggaaaattgtcgagcgacgggaccaagtcttgatgacttgtttcttttcgctatcggcttgtgcttcaatcttgttgagcaagtgtgcgtctgcgaatggtccttttttcaaactacgactcattatgaaacctccttcgaataaaaagttcaatgtgacttatgtttaagccgcattggctttagacatgttcaattggaattgattatcttgatttacgatgacgaataataagtttctctgaacgagccttactactacgagtcttcttaccaagcgtcttcttaccccatggagacataggagaaggacgaccgattggagctttaccttcaccaccaccatgaggatgatcattagggttcattactgacccacgaactgtaggacggatacccatccaacgtttacggccagctttaccaatcttgattaattcgtgttgaccgttaccaacagtaccgatcgttgcacgacatgtaagtaggatcatacgtgtttcgccagaagttaaacgaacgatagcgtatttgccttctttacctaataattgagctgatgtaccagctgaacgaaccaattggccgcctttaccaggttttaattcgatattgtggataagtgtaccatcaggaatattagctaatggtaatgcgttacctactttaatatcggcatccacaccagattcaacaaccatgcctacttcaagacctttaggggcgatgatgtatgctttgataccatctggatattggattaatgcaatatttgaagttctgtttggatcgtattcaattgacttaacagtcgctttgataccatctttgatacgtttgaagtcgatgacacggtatttttgcttatgaccgccgccacgatgacgaacagtgatatgaccatgtgcattacgaccagcagtatggctttgggattccaacaacgtcttttcaggggttgtctttgtgatctcagcaaaatctgagctggtcatattacgacgaccatttgtggttggtttgtacttaataattcccacgtgtataccctcctataattattctatttaagtgttgcttaatcttcgaaaatcttgatttcttttgaatcagcagttaaagtaacgattgctttacggcgttttttagtatagccagcatagcgaccttgacgttttaacttgccacgaacgttcatgatgtttacgtttttaacgtttacaccaaagatttcttcgattgcgtaacgcacttgtgttttgttggcacgaacatcaacatcaaatgtgtatttcttgtcgtccattgcagccattgaattttcagtaactactgggcgtaaaataacatcgcgtgcttccattatgcaagcacctcctcaattttagaaagagcagcttgagtaaggattaatttttggttgccaacaacgtctaatacgttgataccatcagcagctacaacagttacattaggtaagttgcgagctgataatgcagcaaaatcatttccgtcttcaagtactaccaatgctttagtattaacgtctaacttgttaagtacttcagcgaattctttagtcttaggtgcgtcaaagttgaatgcatctacaacaactaaatcattgtcgataaccttttgtgaaagtactgacttgattgcaagacgacgtactttacgaggtaatttgtagctgtatgaacgaggtgtaggaccaaatacggtaccaccaccacgccattgaggtgaacggattgagccttgacgagcacgacctgtacctttttgacgccaaggtttacgaccaccaccacgaacagctgatctgttcttaacagcgtgtgttccttgtcttaatgaagcacgttgcatgatgattgcatcaaacacaacgttttcgttaggttcgatagcccagattgagtcgtttaattcaacgttcccattttggctaccatcttgtttaaataatgttacgtttgccattggtaaaatcctcccttctcagattatttgttacgagctttaacagctgttttgattgtaatcattgagtttttagcacctggcacgttacctttaacaaggataacgttcttttcaacatctgtacttacaaccacaaggttttgaacagtacgttggttgttacccatgcgtccaggtaataatttacccttgaagacacggttgataacagcacccattgaaccaggacgacggtggtaacgagaaccgtgacccataggcccacgtgattgtccgtcttttttaatgttaccttggaaaccatgacctttcgttacaccagtaacgtcaacgacgtcgccggctgcgaaagtatcaactttgatttctgttcctacttcgtaatctcctaatgcgacatctctgaattctctaatgaagcgcttaggagtagtatttgcttttgctacatgacctttagcaggtttgtttgacaagacttcacgtttatcttcaaaaccaacttggatggcttcatagccgtctgtttcgtttgttttaacttgtaaaacaacgtttggagttgctttgataactgttacgggaattaattcgccgttttcagtaaagacttgtgtcatacctacttttctacctaagattccttttgtggtcatggtaacacctcttttctagtatttttaattggttggtacgaattaaagcttgatttcgatatctacaccacttggtaagtcaagtttcatcaatgaatcaactgtcttaggtgtagggttaacaatatcgattaaacgtttgtgtgtacgcatttcgaattgttcacgtgaatctttatgcttatgtggtgaacgaagcactgtataaagtgttctttcagttggtaatgggattgggccagagatagtagcacctgttctctttgctgtttccacaatcttgtcagctgattgatccaaaatacggtgttcgaatgctttcaaacgaatacgaatcttttgttttgccatgtttttccctccttcgtctattttaaaagtagactagctccgtgaaaatttttccggcacgcccgcccatggcaaagcggccgggtgtgtcgcaacctctcacatcttagctactcggtaatctttttgactaccatggtgcgcactcctgctatggaaatagcactttatctatcttacaagatacaacccgataacgcaacccttttttgctgatttatcaaagtttttcataacattttcataaatcttgtagcaagcgtcattcgtggatttctagccatgttttgatacactgaaagcaacttaaatcccctccaggaggtccttatcatgtcccataacgcacttttgattatcgactatacaaatgacttcgttgacccaaacggtgctctgacagccggcaaacccgctcagaaaatcgttcctgtaattatcgaattagctaaccagttcctagcagccggtgattacgtcatcttaccgactgatttacacgtcaaggatgatccatttcatccagagagcgccctattcccaccacataatctagccaatacttggggccatgagttttacggaccactagctagctggtacaccaagcaccaaaccgatcctcacgtctatgcatttgcaaagaatcgctattcagcatttgctaacactaatctggataatttcttacgcgagcgcgagattgacgcgttaacactgactggcgtttgcaccgacatttgcgtgctccacactgcagtctcggcatacaacttaaattacccactaacaattccagccgctgctgtcgcaacttttacaccgaacgggcaagaatgggcactcgcgcattttaaaaacagcctcggagctacaattatctaatttgacttttaacgatcatctgttatcttaaatgacgggacaatgtacccattctatataaaggagattctttttatgttaaaaacaaacacagcaattgtgctatcaatggcggtattcgctgcttagatagccagtgccgccattatttcatttagatcatcatgaaataacacactggaggcgcatcatcatgcaaacacaacaaacagcttttttaatttttcaaagccaaggccattacaaagtcctactcaatcatcaagaattaaccgcaacaatcagcggtcggtatcgccacttggcagaaagcactaacgacctgcccgttgtcggtgatcaagtaaccggcgtgatctatgatacggattatttccaaatccaaggacatctcccccggcacacgcttattcaacgacacaacagtaataagcaacaacggattcaaactttagcggccaatattgcaacgattttcatcgtaacatccgccaatcaagaattcagcgaagcgcgcttacaacgctatttaacgatggcttgggatagcggcgcaacaccggtgattgttttgagtaaaaccgatttagtcagcgactctgagctaacaacctttcttgacgccatcgcaagtgtgacattcgacagcgttcccgtcatcacaactggccagacggcatcaaatgttgcagcgactttcaaaccgtatttaacagctggacaatgggtgacatttgtcggctcatccggcgttggtaaatcaaccctgatcaaccagctcattaaagagccttccgttttaacgagcggcattcgcgctgacgatgataaggggcgccacacaaccaccaatcgacaagcctgtcaaactgctagcggggccttcatcgtcgatactcctggcatgcgcgaactcggcatgacaagtagcatgtctaaggcactcaagacagtctttactgatattgagacgctcgcacaggactgtcgatttaaggattgccagcatcaaagcgaacccggttgcgccgtacgagccgcaatcgatgcaggttcattaatgcctgaacggctagctgatttcaataaactggctatcgaagcggactatagtcaactatccgcccgcgaaatcgaacaagcaaaggttaaacgtctgatgggcagtttgaaaacacgtcctacaaaacaaaactaactcagtaagccgtgcctagaaacacaaaaagggagttacgacaaaagtgatttttgtcgtaactcccttttttggagaagtttatatgaaaaagagtttgagtttttttgccagggcggtggcaaatcgagttagcggggattgaacccgcatgaaccagtcttaatgatcaacaaatccttgcgccttcgaaagcaagtctctatcaatcaccagaaaaccattcactgttcttgggaggaatttcaaatgggccggttcgttttaccattaaactataactcattggtggtgctttacttagacggattctttagggaggaattgtctaatgaaaattcatttaatcttgcttttcaaggtaactttttccgcctaactacgcgaagacaacgatcaccttcgttgctcattatcctcgctatgttatgctcaaaagctaaccaccttgaaaagcatttttaccttttcagattatttcttgggaggaattcatctgatgtatacagaataccaaccagttatgaattaaatatgaactttcatttacgaaactgtaaaatcgcatttttacgcacaaaaaaaggactcgtcgcaatgacgagtccttttccaatcgaaaccaatcacttaagattagcggcttattggccaccgttcttcttgatgatttcttcttggatgctcttaggaacagctgagtagtggtcaaataccattgtaaatgtcccacgaccttgtgtagctgaacgtaatgttgtcgcataaccaaacatttctgacaatggtaccattgcattaacgatttgggcattaccacgtgcttccataccttcaacagcaccacgacgagcagttacttgtcccatgatatcgccaagatattcttcaggagcaataacttcaaccttcatgataggttcaaggatttcagcgccagcttgtttagcagcgttcttcaatgccattgatgcagcaatcttaaatgctgattcattagaatcgacatcatgataactaccatcatataacttagctttaacgtcaatcaatgggtaaccagctaagacaccgtttgccattgattctttcaagccttgttcaactgatgggatgtattcacgaggaaccacaccaccgacgatagcgtcttcgaattcgaagcctttaccttcttcgttaggtgtaaattcaacccaaacatcaccatattgacctttaccaccggattgacgaacgaatttaccttgtgcagatgcttgttttgtgaatgtttcacggtaagcaacttgaggttcaccaattttggcaaccactttaaattcacgtctcatacgatcaaccatgatatccaaatgcaattcacccatcccagaaataagcgtttcgcctgtttcattgttggtttcagccttgaatgtaggatcttcttcagcaagtttttgtaaagcaagatctaacttatcacgatcttcttttgattcaggttcaacagaaacttggataactgggtcagggaattccattgattccaagattaatggatgatcaacgtcagtcaatgaatcaccagttgttgtattcttcaaaccgattgcagcagcgatatccccagagaatacttcaggaatttcgttacggtgatttgaatgcatttgtaataaacgaccaacacgttcacgtttgtctttagttgcattcaaaatgtatgaaccagattgtaatgtaccagtataaacacggaagaatgttaaacgaccaacgaatgggtcagtagcaatcttaaatgctaaaccagcaaatggtttgtcatcgccagccatcaattcaacttctgaatcatcttctgggtttttagcgttataaggacgtacgtctaatggtgatggtaagtaatctacaacaccatccattaacatttgaacacctttatttttgaaagctgaaccagcgaaaactgggaagaatttcaaatcgatagttgcttgacgaatagcagctttcaattcatctttagaaatttcttcgccttctaaatatttgtccataatgtcgtcattaacatcagcaacagcttcaactaattcggcacgacgttttgtagcttcttcaaggtagtcagcaggtacatcaactgtatcccacttagcacctaattcatcttcatcatagatgtcagcttgcatttcgatcaaatcaataacgccttggaattcatcttcagcgccgattggcatttgaacagcatgtgcattagcttgtaaacgatcttccaatgttgtcattgagtaatcgaagttagcaccaagtttgtccatcttgttaacgaaaacaatccggggaacaccataagtagttgcttgacgccaaacattttcagtttgaggttcaacacctgattgagcatctaagacagtgattgcaccatctaaaacacgcaatgaacgttcaacttcgattgtgaaatcaacgtgtcctggtgtatcaatgatattaactcggttacctttccattcagctgttgtagcagctgatgtaattgtaatcccacgttcttgttcttgttccatccagtccatttgtgaagccccttcgtgggtttcaccgatcttatggattttaccagtgtagtacaagatacgttctgtggttgttgtcttaccagcatcaatatgagccatgataccgatattacgcgttttgtctaacggaaattcacgtttgtttgccataagtgaatattactcctctcgaatattaagctatatacaacaagaggccattatatgatttgaatacatataacagccaaccttgttaatcttaccagcgataatgtgcaaatgcgcggttggcatcagccattttatgtgtatcttcacgtttcttaactgcagcaccagtgttattggcagcatccatgatttcacgtgcaagacgttgatccatggtatgttccccacgtaggcgagcatagcttactaaccagcgtaaacctaaagttgtacgacgttctggacgaacttcaattggtacttggtagttagaaccaccgatacggcgagctttaacttcaagtactggcatgatgttgttcatagcttcttcgaacacttctaatggttcattaccagtttcttctttaataatatcaaatgcatcgtataagattgttgacgcagtaccacgtttaccatcaaccattaagcggttgattaagcgtgaaaccaatttagaattgtacattggatcaggtaaaacgtcacgttttgcaacatagccttttcttggcatcctgataacctcctcaagatatttaagtccttgaagtaacacacagtgtcatttaaacttcaatcgactttttcaaatttttttgtgtgttattttttaggtctcttagtaccatacttagaacggctttgcatacgaccgtcaacaccggcagtatctaaagcaccacggataacgtgataacgtaccccaggtaaatccttaacacggcccccacggataagaacaacactatgttcttgtaggttatgaccaataccaggaatataagctgtaacttcgattaagttagataaacgcacacgcgcatacttacgtaaagcagagttaggctttttaggtgtcatagtacccacacgagtagcaaccccacgtttttgtggtgctggattatctgtagcttttttcttcatactgttgtagccaaagtttaatgcaggtgcatcagactttgaagttcttgatttacgacccttacgtaccaattggttaattgttggcatttgaaggttcctccttccttgatctgaaagttatttttgagttttaagtccacacatccaggtggttctttttttacgataaaaaaatggcaacctagattgcgtggattgtaatgcatttttagacgtcagtcagcatgtctgaatatcagaaaacttccgtaaaaagcacatctacaagaatagcatgcacaactacgaaagtcaacgtgctataagccagtttttcagaaaaagttgcgccctttttttgtagttatcataaaggagatgacacgtttgttaatatattttttaacctttgttattggcgcgtgttgcgcctcttttttaactgtttgtgcttggcgttggccactcggtttatccatcacatggcctggttcacggtgtgacttctgccatcacgccctcgcttggtacgacttatgtccaattatcagttacctcattctcagagggcactgccgctattgtgatactcgaatccagcaccatttttttactagtgaggttattggcggcttgttagcgtgttgtttagccagtcaatatttcacaccacagattggctatttattgcttatcctttatttgttgagcctagtcgatattttccatacagctctatacccagttccaatggtactggcttttatgcctttgtttattgactactggccgacaaaccattggctcagtgccctattgattggcagcaccttatctgtcatcaactacttttcagatggcatcggtactggtgacattgaattattggcaattcttgggttgtggtttggattggaggtcaccctatccatgttattaattgcctgtctcctctgtttaatcaaatatctcattgatagtctccaccatccagttgtcctcgccttagtcggacgccgcccaattccatttgtcccgtatatcagctacggtgtcttaatcgttttgtttattgcaaacacataaaaaagggcctcaccatgtcggtgaggccctttaacgtgcaatttagagcaactgttctaaattggcactcagttattcttttgtttcttctttcatctgtgcttcgatgtcactgattgagtagacattttctgatacagcgccgactgtcttaggttccatatgacgatacttcgccataccagtaccagctgggacaatcttaccgatgataacattttctttcaaaccaagtaatggatcgctcttaccgcggatagaagcatccgttaagacacgtgttgtctcttggaatgatgcggctgataagaaactatttgtttccaatgatgctttcgtaataccaagcaagacaggacgacaagtagcaggtacgccaccgctaattaaggtttcgtggttacggtctgtaaattcactaatatccattaatgtaccaggtaagatttctgtatcacccggatccatgacacggactttacgtagcatttgacggaccataacttcaacgtgtttatcgccgatttcaacaccttgcatacggtaaactttttgaacttcatgcaagaggtagttttcagttgataagacgtcacggactttaattaattgtttaggatcaacagaaccacccgttaacttagaaccacgacgaaccatgtcgccttcgttaacgatgacgttggctgtgtaaggcacactatatgaacgtgtatctgtttcaccttgaacagtgatttcacgtgtatgttctgcagggttttcttccaccgcaacaacttcaccagttacttcagtgattgttgcaagccccttaggattacgcgcttcgaaaatttcttggatacgaggcaaaccttgagtgatatcttcaccgccggcaaccccaccggtatggaagttacgcatggttaattgcgtaccaggttcaccgattgattgagctgcgactgttccgactgcttcaccaacttcaacttcttcgccgttggccatgttacgaccgtaacattttttgcagacaccgtgttttgtgttacatgtgaagacagaacgaattgtgacttcttcaacaccggcatcaacaacagcttgagcaagttgttcatccattaattggttacgttgaaccatcacttcacccgttgttgggttaacaatggtcttcattgcgcaacgaccaacaagacggtcatacaatggttcgattaattcattaccttcgcgaattgagtgaatgagaagaccacgatcagtcccacaatcttcttcacgaatgataacgtcttgagcaacatcaactaaacgacgtgttaagtaaccagaatcggcagtcttaagcgccgtatcagtcatccctttacgggcaccatgggtagacataaacatttccatgacagagaggccttcacggaagtttgatgtaacaggaacttccatcatcccaccattaggagcagccatcaacccacgcataccagcaagttgcgtaaagttagagatgttaccacgggcaccagaatcagacatcattgagattgggtttgttggatcaaacgaatctgtgagtcgttgttggatatcgtctttagcatcgttccagatttcaataacgcgcgcatggcgttcttcatctgtaatcaacccacgacggaattgtttagaaaccgttgtgactttcttatgggcttcatcaacaatttcttgtttttcaggtaattgaggaacatcggcaaccccaactgttaaaccagcatgggtcgcttgaacgtaacctaaggtcttcatatcatccaataagtcagatgtccgttgaaccttatataccttgaagacttgcgcgatgatatcacttaagaagcctttcttaaatggtaagatcactggggcacttgagaggtagtcatgaatatcttcaccgttatcgatgaagtatttatctggcacaccattcatcaagttatctgttgttggttcgttcaaatatgggaagccagttggcatgatttcgttgaacatcactttaccaacacttgttaccataatcttgtggcgttgttcgtcagggaatggacgattatccatatcaacaactgacaaaccaatccgactgtgcaaatgaacgtgacctgtttgataagccattaaaacttcgtttgtatctttgaagatcatgccttcgccgagactacctttttgttcaagcgttaagtagtagttccctaaaacaacgtcttgagaaggtgtaacgattggtttaccatcttttggtgccaaaatatggtgagcggcaagcattaacattcttgcttctgcttgtgcttcatcagataaaggtacgtggatcgccatttgatccccatcgaaatcggcattgtaagcttcacaagctaatggatgaagacggattgacttaccatcaaccaggattggttcgaatgcttggataccaagtctatgcaatgtaggtgctcggttcaatagaactgggcgttccttgatgacatcttctaaaacatcccaaacatcgtcatcttgacgatcaattttacgttttgcatttttaatgtttgaagccatatcgcgtttcactaattcgtgcatgacgaatggtttgaacaattcaagtgccatttcacgtggtaatccacattgatagaacttcaatgtaggaccaacatcgataacggaacgaccagaataatcgacacgtttaccaagtaagttttgacggaaacgaccttgtttccctttcaacatgtgtgaaagagacttcaatggacggttaccaggtccagtaactggacggccacgacgaccattatcaatcaaagcatcaacggcttcttgtaacatccgtttttcgttttgaacgatgatgcttggtgccatcaagtctaacaagcgtttcaaacggttgttacggttgatcacacgacggtacaaatcattcaaatcagatgtggcaaaacggccaccttccaattgaaccatcggacgtaaatctggtggaataactggaatagcatccataaccatccattcagggttattccctgatttacggaaggcatctaagatgtccaaacgacggatagcacgcgttctcttttgaccttgtgctgacttcaagtcttcctttaattcagcaacttcgccttcaagatcaacgtcacgtaacaattctttgatggcttcagcacccatcttagcgttaaaacgattaccgtattcatctaatttttcacgatattcacgttcggtcatcagttgtttcttttctaaggctgtatcgcctggatcaatcacaacgtatgatgcgaagtaaataatttcttccaatgcacgagggctcatgtctaagacaagacccatccggctaggaatccctttaaagtaccagatatgtgttactggtgctgcaagttcgatatgtcccatgcgttcgcgacgcacttttgaacgtgtaacttcaacgccacaacgatcacagacaattcctttataacgaattcgtttgtacttaccacaagcacattcccaatctttcgtaggtccgaagattcgttcatcaaaaaggccatcacgttcaggttttaaagtacggtagttgattgtttctggctttttaacttcaccatacgaccaactacggattttatctgaagatgctaaaccaatttgcatactttcaaacttattgacatctatcaaagggccgacctcctcataatttatagcacgctttattcagcagatggatctactgcatcagcatttgctgcttgtgctttttcagcttcttcttgtgcctttttggcttcttgttctttagcgtatttagataatgcatcgatgttttcgatatcatcatcatcgtcgtccatatcgcgtaattcaatttcttgattatcgatatccaagaccttcatatccaagccaagtgattgtaattctttaaccaatactcggaatgattccggaacacctggttttggaattggttcacccttaacgattgcttcgtatgtcttcacacgaccaacaacgtcatcagacttgtaagttaagatttcttgtaaggtataagcggcaccgtaagcttcaagagcccaaacttccatttcaccgaaacgttggccaccaaattgagctttaccacccaatggttgttgcgtaacaagtgagtaaggtccgattgaacgtgcatggagtttatcgtcaaccatgtgggctagtttcatgtagtacatgacaccaactgacacacgtgtatcgaatggttcaccggtccgaccatcataaagaatgctcttaccatcagaaggcatgtttgcttcacgaacagcgtcccataaatctttatcttgcgcaccatcaaagactggtgttgcaacatggatgcctaagtttctagcagccatcccaagatgtaattcaagaacttgtccgatattcatacgagaaggcacacccatgggactcaataagatatcaactggggtaccatctggcatgtatggcatatcttcttcaggaacaacgattgaaacagtccctttgttaccatgacgaccagccatcttatcgccgacttggatcttacgtttttgtgtaatgtaaacacgaaccatcatgttaacacctggtgacaattcatcgccagcttcacgcgtaaagatcttaacgtcctggataatcccgccgccaccatgaggtactttcaatgatgtatcgcgaacttcgcgagccttttcaccgaaaatagcgtgcaataagcgttcttcggctgataattctgtcacacccttaggcgttaccttaccaactaaaatgtcgccatctttgacttcagcaccaacacggacaatcccgaattcgtcaagatccttcaatgaatcttcaccaacgttaggaatttcgcgtgtgatttcttcaggtccaagttttgtatcacgagcttctgattcgtattcttcaatatggattgaagtatataaatcttctttcactaaacgttctgaaagaacgatcgcatcttcgtagttatacatattccaagtcatgaaagcaatcaatgggttttgacctaaggctaattcacctttttccatagctggtccatcagcgataatttcatcaacatcaacgtgatcgccttttgcaacgattggacgttggttgtagttcttaccagcatttgaacgacggaatttcattaattcgtacgtatctaatgagctgtcttcacgacgaacgcgaatcactttcgcatcaacgtattcaacagttccgggatgttgtgctaataaagcaatccctgaatcgtgggctgctttatattccatccctgtcccaacaagtggtgcatgtgggtcaactaatggcacagcttgacgttgcatgttagcacccatcaaggcacggtttgaatcatcattttccaagaaaggaatgcaggccgtagcgacagcaactacttgcttaggcgaaacgtccatgtaatctaacttgtcgattgaagtttcaatattgtcatctttgtaacgtgctaaaacagtatcatcaacgaatgaaccatcatcgtttaatggtgagttggcttgcgcaatgacatagttatcttcttcgtcggctgttaaatagtcgatcttatcagtaacatcatgcgtatcccaactaacacggcgatatggtgtttcgatgaagccgtaacggttaacaacagcgtaactagccaaactgttaatcaaaccgatattagggccttcaggggtttcgattgggcacatacgaccataatgggtatagtgaacatctcgaacttcataaccggcacggtcacgagtcaaaccaccaggtcctaaggcagatagacgacgtttatgcgtcaattcgccaaggggattggtttgatccatgaattgtgacaattgtgatgaaccaaagaattccttaattgaggcaacaactgggcgaatattgatcaattgttgtggtgtcacggtgcttgtgtcttggattgacatccgttcacgaaccacacgttccatccgtgataaaccaattcggaattggttttgtaacaattcaccaactgaacgaatccgacgattccctaaatgatcaatatcatccgttgaaccgagaccttcttgtaagttaaagaagtagttcattgaagcgatgatatcagcaggaataacatgcttaatcttggcatcgatatgaccgttaccgattaagttgatttctttatcaggtgttttttgtgagtacactttgatcacttggagtgtcattggttctggtaagacaccttcatcagatggttggtaagtaaccgtcttgaagtcttctttgtctaagtatggtgccaaagcatccatcacttgacgatcaacaactgtatctttagcagcaatcacttcaccagtatcgggatcagcaagtgtttcagctaatgtttgacccaataaacgcgtctttaagcttaatttcttgttgatcttgtaacgaccaacagcagctaaatcataacgtttagcatcgaagaaacgtgcataaagtaatgaacgtgagctatcagctgtcttcggttcgcctgggcgaagtctttcgtagacatccttcaaagcttcttctgttcttgagtcgtcagtattcttatggatatctttttctaacgtcaacattaatgaatcgttgtcgcctaagatatcgataatttcttgatcagaaccgtaacctaaagcacgaactaaaacagacattggaatcttacgtgtccgatcgatccgaacatatgcaatatccttagcatctgtttcaaattctaaccatgcaccccggttaggaatgacagttgtaccataagttgtgcggctgtttttatcaacagcgctgttgaaataaacgcctggtgaacgaactaattgagaaacaattacccgttcagcaccgttgatgatgaaagtcccttggtcagtcatcaatgggaagtccccaaagaaaacgtcttgagatttaatttcaccagtttcatggtttgttaatttcaaagtaacgtgtaatggtgctgagtagttggcatcatgttgtctagcttcttcaaccgtgtatttaggttcaagaagttggtaatcaacgaattctaatgataagttaccagcaaaatcgtcaattggcataatgtcatcaaacatttcacgaagcccttcgtctaaaaaccattgataggaattagattggatctcgatcaagtttggtagttctagcacttctttaatccgtgcgtagcttctacgagtacgatgtttaccgtaattcactaagtgtcctgccaaattgttcacccctctataagttttccgcagcctcattgttacaaaaatatgacaaatattaagaaaatattacatcgccattttttgataattttgagcagaaaaaaaacaaaaacagttattttaagctgaataaatcagactaactatttttgtttttcatgaataccgtgctggacaatagatcagcacaataaatttttctacggattttcgcagttactgtataatatacttcttttactactaaaagtcaataatctgcctcggtactacttatcatagataaattgattattataaaatttagatttggcgctcaaggccttatcaacctttttcaatcccttttcttctattaatgtctttttcgttgaaaatagattagttcctaagcctaaacgttctcccttaatatcaacccccattgcggcgagcgtcgttgggaacatgtccattgtgctaaactggcgattcttggtttgaacctgacttgcttttggtgcatttaaaatcaaattaaatgcatgccgtttattggccggaatcttcttataatactccacatccatgcctaaatggtctccgttgacaatgatggtcgtattctgataaaacgactgcgtttgtgcccacttaataaattcaacaatttgatgatcagaaaaggcgataacgtttgaatactggtcaccatacttttctggcatattcggttctggatacccaccaatgtggtgcgtattctccgttagcatcgttaagttaaatggctgatctgatttgctaagctccaacgcactttccttagcgtattcgaataactttgaatcttcatagccccaccaaacataatagtcttcaggtaaccgaccatctttacgcgcagttaacaaatcatcaatttgaacattaccgtgctgcgtaaaatatgatcgtcgaccaccaaaagtcgcatccgatccaagcaagattttttgctgatagccgtgcttgtccaaaatattatttaatgacgtgacgcctggtaggaaatgattctttttatctgtcgcataggaattcccatccaccggcactttcaacggtaatcctgatgtttgggcgaccattcccgcaactgtccagcctgttcctggtaattgttgggcaccaccaaatgatcggttagaatttgagaagtgaacaccctcttgctcagctaacgccgtcaattctggtagtaaattggttttcatctgcccacccatttctcttgatgttgctgtagattcgagtgactcagcataaatataaattagatttcgtttttgttttgggaacgttaatttggttttattcggtgctacataattttcttcaataaatggtgaattcgccgttagatattcgtaaaaaccaacagcatcaattttaatcgcagcaaccgtcgtcaaaccacaaaacaataacgcactgaccaatacaaatcgttttgccttgagttctaagtggtgtgttattttatgagtgaccaacagttgcaagtgtctgatatagttgcagaacaaaaaaacgctgattaaacaagtaatggcacctagcaccggaccgccgataaatgaattaataaaaccatcgtcaacacctgtcatcggttggcgtaagttataaactatctgctcgggcgttaacaagccaaaatttgcctttgtccaaaaactagctgacaacaagaaatacccaactgatattaataaggcaccactaaaaatccaccagctaaaccaatgtcttgtgcgtgtgactggtaccagttcaaatattaaccatttttggcgccaccttcttgtcaccaacacgacgccttgaataatggtaatcaacataataaacttgagtaaaaataacttttggaacaaaccatcactaaaatgaataacatgaccagtcaacccaaaagtcactaaaatcgttaatcctaatacaagcaccaaattgatcaacataccaactaattgaataaattggcgatcattgcgttggacaatagcacataaaaaaggtaaacagacaaacaagtagatcatcgcaataaataacattatgtatttgctccatttctaactatctcatttaatcatagcattttatggctgtatcgcctacccacccttttaacaaaagtctctaatgacaatcttcaagcccctcacggaatcatttacaaactcgcgacttatcatttacgttttttacacgaattagcggtcaatctttacacgacgtctctatactgaacttgtacccttaaatcagtcctcaggaggaatcattatgaaacgcattagtatggcattactcacagttggtgcggccgctcttttattagctggttgtcaaggccaatcaaaaagtgcaagtcaaagccaggatcaaggcgctaaaattactgcagttggttcgacagcccttcaaccccttgttgagcaagctggcgatcaatatcaaaaggataaccctaaagtcaacgtcaccgttcaaggtggcggttcaggaactggtttaacccaaattagtggtggcaacgtcacaatcggtaactcggacatcttcgctgaagaaaaagatggtatcgatgctaagaaacttgttgatcacaaagttgctgtggttgcaatcgcacccgttgttaataaaaagttaggcatcaaaaatttaaccagtgcacaattgctaggcatctttaaaggcgaaatcacaaactggcaatccgttggtggtcctaacgaaaaaatcaccgttatcaaccgggcccaaggaagtgggacacgtcaaacgtttgaaaaattaggtcttaaaaccgacaaagttgttaccagccaagaacaagattcctctgggactgttcaaaaaatcgtcgaacaaacgccaggcgctatcagttacctcgccttcccatacatcaaaggtaacttgcaagccgttaagttaaacgacgttgagcctaccgaaaagaacgtttcaaccaatgcatggccaatctggtcttacgaacatatgtatactaagggcgcacctaactatcaaacagcccgtttcatccacttcatccaatcaaaagacgttcaaaagacaatcgtccctaaactgggctacatcccaatgacgcaaatgaaagttgagcgccacgttgatggcaccatccaagatcaatagtttccagaagtcgcgctaaactgcgcgactttttaattggtatatactaataaaaagcttttaaacaaagtaatttgcatttatatttatgattggtataatcgaactattagtttatcaaaggagtttggtgaatgattaacaataaaatgaaaacgttatccgaaaaataccccactaaaatggcaattacttccgaaatcatcaacttaaaggccatcttgaacctccccaaacccactgaagccttcatgagtgatttacatggcgaatatgatgccttccagcatctcattcgcactggcgcagggaatctccggcaaaaaattgcagaggtcttttccggtgaaatgactgaagacacaatgcaggcgttcgcttttttagtttactacccaaccgagcggcttgcactcaaacacgcacaactatctgctagcgaactcgatcagtggtacctcaccacttttaaacggttaatcgacctcttaaaatttgtctccacaaaatacacacgctcaaaagtccgtaaagcaatggcgcccgatttcgtctacattaccgaagaattaatgtacggcgatgtagctaacagcgataagaaacgctacttccaagaaatcacgacgtccatcatttcgatgggccaagccgatgccttaattatcgccaccagtcatacgattcaacgactagtggttgatcattggcatatcatcggtgacatttacgatcgtgggccgcgtcccgatctgattgtcgaacaactcaccaagctccccgcggttgatattcagtggggcaatcatgatattctctggttcggcgccgctagcggttctcaactatgtatgctcaaccttttacgcatttgcgcacgctacaataatttagccatcatcgagaaagcttacggaattgaccttagcgaactggttcagtttgcccaacgaacttatcagcccaatcccgccttcgaaccaaaggttgctgccaatcaacccgcaatctcaacagctgaaaagaaaagcatcaaccaagtgcaccaagccatcgccatcatgcagtttaagttggaacaaaccgtgattaaacgcaatcctgatttcaaaatggaccaccgcttaaccctcagccatgttgactttgaacagcagacaattcatctaaatggtcatgactacccacttgataacacctgctttcaaacagtcgaccccacccacccagaaatattaacttccggtgaagcagccattgttacatcattgctaaacgcgtttacccactgccaaaaactacgcaagcatctgcgttttttaatcgacaacggtagcatgtaccaactctacaaccagaatctcctttttcacggctgtattccagttgatgaagccggcaacttcctcacgttaaccctcgctaaccgacaatacgctggtaaatcattactcgacttcttcgatcaccaaattcgaatgagcttcgaccacccgctcaatcaagataatttatccaccgatttactctggtacctgtggacaggaccgctctccccactatttggcaagaacgcgatgacgaccttcgaacgctacttcagcgccgaccccgttttacacgaagaaaagaagaacgcatattaccaactccgccatcaggaagacttcattgagaaactcttgttggagtttggcttaacgccagaaacggggcacattctcaatggtcacacacctgtcaaaaaaggccacaatccaatcatggctaatcgcaaaatgatcgtgattgatggcggcttttcaaaagcttatcaccacacaactggcattggtggctttacgctcctgtacaattcgtatggaatgcagttagtcacccatcagccgttcaccacacgagccaatgcaattgccaagatgcaagacattatttccacgcgtcgagtgattgatcaagttagtcaacgtcaacgtgtcagtcaaacgaatatcggcgctgcgattaaaactgaaattgaacagctcacgacccttttagggcaaaaaaataaggtgtcagaccaattggtctgacaccttatttacgtttaaacagttactttatcagtcttactggtaatggtaattttacctttagttgcgccaattgtcaccggtacacccatcgtaatctcgccagcaagcaacgcttcactcaactgatcttctacttgggtttgtagcgcccgtcgaattggtcgtgccccatattcaggatcgaacccagctttggcaacaacatccatcgctgcagctgtcatcttgatttgaatcccttgttccgctaaacggcccaagacattcttcgccataatcttcacgatttcgcgcaattcaggttgtgttaaggaatggaagacaaccgtttcgtcaattcggtttaagaattctggacggaaagctttcttcaattcttccataatgcgcccttgcattgctttataatcagcagttacatctttaaccccgaacccaacggatttatcatcacgtaaggctgtcgcacctaagtttgatgtcataatcatgatcgtattacggaaatcaaccttacgtccttttgaatcggttaaatagccgtcatccaagacttgcaacaagatattgaagatatcagggtgggccttttcaacttcatcaaataaaatgacggaatatggtttattgcggagcttttctgttaattggccgccttcttcgtagccgacatagccaggggccgccccaactaaacggctcgtgctgtaacgttccatatattcagacatatcaacccgaatcaagttgtcttcagaaccaaacatggcttccgccaatgctttggctaactctgttttaccaaccccggttgggcctaaaaacataaatgaaccaattggtcgttttggatctttcaaaccactgcgcgcacgacgaatcgcacgtgaaacggcagaaatggcttcttcttggccaacaacccgtttatgcaagactttttcaagttgcatgagacgttcgctttctttgcgttgcaactgagtaacaggcacaccggtccattgcgcaaccacttgagcgatgtcttcagcagtcacttgaatgtcactgcgaacaccgttttcttgttcggcagcttgtaacttggcaatcttggccttagtggttacttcttgctcatgaatcgtcgccgctttttcaaaatcttgcgcgcgaacagcggcttctttatcgtcatttaaagtttgtagtttttgttctaatttatccaacggtgtcttctggttaacagcatccaatcgcactttagccgtcgcttcatccattaaatcgattgccttatccggtaagaatcggttcgtgatgtagcgatttgataagacaaccgcttcatgtaaagcttcatctgaaattgcaatcccatgatgagcttcataacgtggacgtaatccctttaagatttgttccgcatcttctggcgttggttcattgaccgtgacggtcgcgaatcgccgctctaaagctgcatctttttcaatgtacttttgatattcatctaaagtcgtcgcaccaattaattgtaattcaccacgcgctaatgctggtttcaagagattagaagcatcaattgccccttcagcgccacctgcaccaatgagggtgtgtaattcatcaataaagagaatcacttgcccatctgcatagatttcatcgataatcttcttcaaacgatcttcgaattcaccacgatactttgtcccagcaaccaatgaccccatgtcgagcatcatgagccgcttttgctgcatgtcacttggcacatcgccattgacgatgcgttgcgcaaaaccttcagcaatcgctgtcttaccgacaccaggttcaccaactaagacgggattattcttcgaacgccgggctaaaatctgcacaagtcgccgaacttcttcatcacgacccacgaccggatcaatttgattgtcacgagcaagttgtgttaaatcgcgcgctaattggttcaacgttggtgtcccagcttgatcggcattattcttagctgctttagcccgttttttagcggttgctgtatccacacccatcttttgaagtagtagttggcgtgttttagctaaactaagtcctaagttcaataagatccgcgcagcgataatatcatcatcacgtaaaagtgctaataataggtgtgctgtgccaattttaaccgaattagcttgttgcgcttcaacccgagcaatatcgagtacttgtttggctttgggcgaatatggtaaataaccgctaatgccagaagcgattacagcatcgccatatccggttaagcgttcaatttcttcaaggacatcggtcgaattgacacctaattcgcgtaaggtagtcccagcaattccctcattttctaatacgattgctaataggagatgttccgttcctagtgcatggtgattaaatttctttgcttgttcttgtgccatcattaagacgttttttgcacttggtgtaaatagattattcatggataatcccccactctttacttaatttcatatcgtagtcgttctaacactgcaactagaatctgtgctcgaagctgctcttctaattgtttattattaaccgctaatgtctgtggactcgttgccgcgagtatcaaattgccttccttttgcgaaagaatttgttcatcatatagtttctggataatggctaaggtgtccgcctgggaaatctgcgtatcaacattttcaattaacgcttctaaaaagtcccgatcatcgagaaattgaaccttgacgatccgaatataaccaccgccgccacgcttactattcacgacataaccgcgctgctcagtgaaccgcgtattaatcacatagttaatttgggacggcacacaattaaaaagcttagcaatttcggagcgtctaatttcgatttgttcattgtcagccagtatcttttttagataggcttcaataatatccgagatgttctgactttgcaaacatatcagccccttcatttagtcttctgcgtttttcagtgtcaaaagtttaactttgactaacgttgactattattataacgattatcagtacaaaatgaaagtttactgacttttagtagctaatcaattggacgcacaaaaaaagacttgtcatcaacaagtctttgagagtcgggaaaacaagatttgaacttgcgacccctacgtcccgaacgtagtgctctaccaagctgagctacttcccggaaactattttattacgggtacaaaaaaagcggaagacgggattcgaacccgcgacccccaccatggcaaggtgatgttctaccactgaactacttccgcattttttattaatatttttgtatccagattggctactaagtgggtaaaaaaaaccgttaaccaaccattagcaccctaaaaaaacctaggtcagacaaataatagttgtctgacctaggcttttaaagtgataatttaatcgtttgcgccacagtcttaggaatcccgagtgcttcgagttccgccactgaagcttctttgatatgtttcatcgaaccaaaattcttcaagagtttcgtccgcgtcttaggaccaacccccttgatgtcatcgagtttagaactcaacgaattcttcccgcgtaattggcggtggaaactgatggcaaagcgatgcacttcgtcttgaattcgcgttaacaagtagaagccttggctctttggatccaactgaatggtttgatcaacttccccatataacaacgaggcggttttgtgatgattatccttgaccatccctgcaacgggaattgatagccctaattcgttctctaagacgtctttagccgcattgagctccacaattccaccatccattaaaatcaaatcaggcagtggtttatcctctttgagcaatcgcgaataccgccggaaaatgacttcccgcgtattggcatcttcgttggcgcctgcacgatctgtcgtttgcgttaacttatacttgcgatagagtttcttctcggcacgaccatcaacaaacgtgaccatcactgagacaggatcagtcccttgaatatgtgaatggtcaaacgcttcaatcacgtgtccatgtggtaagccaagcgcgtccataatctcatcttgcgccccaacggtcttgcggttgtcgagttccaataaacggaacttctcttccaacacaagccgactatttttctgtgccatttccatcaacgcttttttctcaccacgttgcggcgtgcgaatcggcacattcaaaatttcggtcaggactttcttttcgaccccttctggaaccagaatttcgcggggtaacacattattcttgcggttgtaccattgtaaaataaaggttgccaattcttcttcaggtgtgctgacacacgggaagagccgcttttcacgccgaatcaaccgtgcttggcggatgaagaagatttgaatcgataaccagcccttatccaaataaaaggcaaataaatcgcgcggggtattatcgttagaaataattttctgcttttcaacggtggcttcaatgtagtggagctgatcgcgcaattctgcggcgcgttcaaactgcatctcttcagcagccgtagtcatcttggccgtcagttcttttttaaccggatcaacttgcccattcaagaaacgtttaatctccttgatttgggccgcatagacactctcaggcacttctttgaaacacgcgcccaaacattgacccatatgataatacaaacagggccgcccttgatgtccctgacagcgtcgtaaaggataaacccgttgtaagaatcgcaatgtttcttgggcggcatacacgtccggataagggccaaaataaaagccgccatcttttttgacatcccccgtgatcagtaggcgcggatcgcgttcattcgtaattttaatgtaggggtagcctgtgccccgcttaagtttaatattaaagtaaggttggtgtttctggattaacgtaatttccaacaaaaaggcctctttatttgtcgatgtgatgattgtttcaaaatcgacaatttcagagaccaatttggccgtttttccttcgtgactactcttgaaatacgagcgcacgcggtttttaagattttttgctttacccacatagataatcttggcattgatatccttcatgatataacaaccaggtaatgcaggtaagagtgctaatttatgttcaatgtgttcgcttgccaaaaacaccactcctttaattcaaaacaagtgttcgtctttctattttacgtgtttttggctaaattgcaactattgtgctaggaccttggctaaaaattgttgcgtccgttcttcttgcggatggtcaaaaatggcttcggggtcccctttttcgacaatttgactatctgccatgaaccagacttcatccgccacttcgcgcgcaaaccccatttcgtgggtgacaacaaccattgtcatcccttcttgtgctaagtcttgcatgaccttgaggacttcgccgaccatttctggatcgagcgcagatgtcggttcatcaaataacaatacgtcgggtgacatcgctaatgcccgcgcaattgcaatccgttgtttctgcccaccagagagttgatcactataagcatccgccttatccgctaaaccaacgcgttcaagcaacgcttttgctttagccgttgtttcggccgctgattctttcttcactttttgtggcgccaacgttaagttatcgaggacagttaaattggggaaaaggttaaagttttggaaaaccatccccatctttgtccgaatctgatcaagctgtttttcagataacgtcatcaaatcggtgccttcaaacagaatttggccactcgttgggtcctctaaacggttcaagcaccgcaataacgtactcttacccccaccggaagggccgatgacaacaatcacttgaccagcttggacttcaccactaacaccatttaacacgaggttgtccccatattttttaaccaattgattaatcttaagcatgttgcatcttcctttccacatagttcaaaagtttcgagagactaaaggtcatgataaagtagatcaccatcgcaacaaaaatcggtgcaacgcctttataagttgctgattgaaccactttgagttgataaattaaatcagtgaccccgataatggaaacgattgaactttccttgattaaagaaatgaattcgttccctaaagcaggccagatattcttcagggcttgtggtaaaacaatgtaacgcattgtatcgcgttgtgacaagcctaaacttcttgaagcttcagtttgcccagcatcgatcgcattgatccctgaacggataatttcagcaacatacgccgcactatttaaggaaacggcaattacccctgccaaaagtgctggaatgttgacccataagccaatcccgaagtagacaaacatgatttgaatcatcaacggtgtgccccgaacaaattcgatatacatgactgccagcgcacgcaccaacttattcttggccaaacgcccaaaggctaggaggaccccaattaaaatcccaattgcaattgaaacaatcgtaatgaataatgtgtagccaatccctttagcgaagtatgaccaatagtgccacatgctagtgttgtgcgtattgaccttcatgagttggcccgcgttctttaagtattgcggaattaatttttgctttttaatttgcccgatactcttattagcagcagcgactaaggttggcgaatcctttggaaaggcaatcgctgatccttgcatgtctgcgcctaaatcaaatttcccattaatttgaacgagttctggatcattacttgcataggcggttgcgactggttcttccgccacaatcccgtcgattttatgactctttaatgcaaggacgagatctgggactttggccaagcccgtaatctgcgcatctttaatttgctttttagcgagtgtttgttggagactccccgtttggacccccacttttttcccgttaaaactatttttggagtggtaaatcttcgcatcagctttattgactaagattgattgaccaccgagataataaacatcagaaaaatcaacactcttgcttcgttcatccgttggtgacatcgccgaaataaccatatcgactttaccggtttccaaaccaaccaataacgcatcaaagtccatcgacttcaccactaacttaacgcctaaatcatcagctagcttctgtgcgacttgaatatccataccgacaatcttgttcttaccgtttttattcactaaaaattcataaggtgcataatcggggctggttcccaaaaacaacgtttttttagcttgcacttggctaaccgtctgtccagctgccaaaacgggctgctgctgaatcatgaaaaacgttaacattaccatgaatggtaacccaacaaaagtgagtaattttttaatcgtcatattatctcctcctctgattagtactatcatacaaccaattaaataattatgcaatatttatttataaaaagtgaatcattggcgaaaccgttattatctggtatgatagatgcaaattagaaaagagggattacgatgggcttaaaagtcactaacaagaccgatttaaccggtttattcgataaattcgcatcactaccagaagaacgccaaaaagttgaagcacaagttgaagaaacagctgataaattaaaaaaggtagatgcagaacaaaaagaaaagcattaaacaaagacagcaaaaaaggcggtaagacaaattcatttttgtcttaccgcctttttgctggtttaaacgtgcgtcatttgcaatcgcctttcggttaacgcgattgtacgctttattctgcgtgtctttctgggtagcgttgttttaattgttcaatgttttcgcgcgcgactttatcaaagtcgaggttattccattccgcaatttgtgataaataccaaagcacatcgccgattttcttagacattattttttcatctagttcgtggccttggaacgcatattttttaacgatatcaaccacttcaccactttcacttgctaagcccaaagctaagttagttaacacttgttcgttaccatataacgttcggttggctaacttttgatagtcattaaattccattatgcttgtccccctattgcacattgcttttcaatccattcccaaactgtctctttaccagcaccagtcagtgcgctaaagcagacaaattgatcgactggattaaaatcaagcgcttctttgatgattttttcttgacgattccattttcccgttgagatcttatccatcttagtagcaaccactaaaacagggatatcataatacttcgcaaaaacgtacatcgcgatatcatcatcggttggttcgtgacggccgtcaattaatgaaataagcccctttagatttgagcggctggttaaataagcctcgataatttgcccaaacttctcacgttgcttctttgaaactttggcatacccataaccagggacatcgacaaagtaaagttcgttttcaacgcggtaaaagtttaaagtctgtgtcttacctggcttgctagatgtccgggcataactcttacgattgattaatttattaatcaatgaagacttaccgacattcgagcgaccagataacgcaatttcaggtaattgatcagttgggtactgcgaagcagctaccgcactcatcaccatttcaacatcatgtacttccataataacctccgattatttccttcgaatgttagtttagcataaataaataattattgcgccgttgacatctctctagtttcatggttaacatatcttcttaaccccgttaaatcgcgtcattgtaccgtttcaaaagtcccttaatgcaaaaaaactgccgcgacaaaatctaatttgtcccggcagtcttttaatttttatgacgcttcttgtccgtcagctaaaaagagttgtgggttggctgtgccatccaccgcttctttcgttacaacaactttagccacgtcttcacgacttggaatatcaaacatcatatccatcatgacttcttcaatgatcgaacgtaaaccacgggcccccgtgtttcgttcaatcgctagatgtgcaatcgcatggagtgcttctggtgtaaattctaattcaacattatccaaggccatcaacttgctgtattgcttaacgagcgcgttcttaggttcagttaaaatatgcaccaaatcatcttcagtcagtttttccaatgcagcggtaatcggaatccgaccaatgaattcaggaataatcccaaatttcattaaatcttccgttacaatttgttgcattaagctttgatcttcattggtagtttgaccattcttgcttccaaaaccaattgtcttttcacctaagcggtttttaacaatcgtttcgatgccgtcaaaggcgccaccaatgatgaataaaatattggtcgtatcaatttggattaactcttgttgtggatgcttgcgaccgccttgaggtggcacactagcaatcgttccttcaagaatcttcaagagggcttgttggaccccttcaccagaaacatcacgcgtgatcgagacgttttcactctttttggcaatcttgtcgatttcatcgatgtaaatgatcccgcgttcagcacgatcaacatcgaagtctgcattttgcaacagcttcaagaggatattttcaacatcttcacccacgtaacccgcttcagttaaagtcgtggcatctgcaatcgcaaatggcacatttaaaatccgcgctaaggtttgcgcaaggaatgtcttcccggaaccagttggtccaattaacgcaatattactcttttgtaattcagtatcgccttcttcggccactgacatttggttgacccgcttgtaatggttgtagactgcgacagataaagcttttttcgcttctgtttgaccaatcacataatcatttaaaatggctaaaatttcttttggctttggcacttctagtaaatcactgaaggcctcatctttaaactcttcatcaataatctctttgcaaaggtcgatacattcgttacagatataaacaccagggccagccacgatctttttcacttgatcttgcgacttcccacaaaacgaacacgttacgggtccgttagttgtttctgtatcatctagcatactgggattctcccctttctcgatatacgcttaccgctgtgagtcgttaaaatacacccctacaacgtaattcagactatagcataactatggtctagaataaagtaaagttactcgcacaccgtcaatgacacaaaagcgggtccaaagtaaacaccttgaacccgctttttagcatcatttaaagcttggattgatcagacgaccttatttagcgtctttcacttctacagctgaatcagcaatgatttcgattgctttcttaacaccgatatcatgttttaacatgtcatctgataagacgctacgaacagcagcttcttccatattgtattgttcagctaaactcttaagttctgcagcaacttcttcgtctgttgcttcgatgttttcagcttccacaacggcttcaagtacaagacttgtcttaacgcgtttgtcagcatcaccagcgaattgtttcttcaaatcatcttcagttgtaccagtgatttgatagtacatttccgggttgataccttgttgttgcatgttacctaagtattgttgtaattgactgttgatttcttcgtcaatcattgcttgaggtaattcagcgattgttgcattttcagttgctttagcaacggctgtatcttggatagcagcatctgcagcatcatttttttgttgttttaattcttcacgaattttttcttttaattcgtctaatgtatcaacactttcgtcgatatctttagcaaattcgtcatctaattcaggtaattccttagctttcacttcatggattgttaccttgaagatggcttctttaccagctaattcttctgcttggtaatcttcagggaaggttactttaacatcaacgttgtcgtctgctttgtgaccgactaattgatcttcgaaacctggaatgaatgaatttgagccaagttctaatgaatagttgtctgcttgaccaccatcaaaaggtacgccatctacagaaccagcataatcgatgacaacagtatcgcccttttcagcagctgcgtcttcttttaataccaattcagcttgacgttcgcgacggttttcaatttcttgatcaacgtctttgattgtaatgcgacggctttgttttggtacttctaagcctttatagtcgcctaaagttacttctggtttaacggtgacttgagcagtaatcacccaaggttcgcctttttccattttttcaacattaatttgtggttgatcaactggttgaatagcagcttctttaacagcagcatcataagcttctggtaagattgcatttaaagcatcttcataaagggcttcttcaccatacatcttgttaaagatttggcgaggcattttacctttacggaaacctggtgtgttgatatttttacgtacacgtttgaacgcaacgtccaaaccttcactaattttatttaaatcaatttcaaaggttagttcaccatcattggtgccctttttttcccattttgctgacataatttccctccgacagttatattcacaatctatcaattgcatacttaatcagcataaactatttaacctaaattgtaaatatttattggtctaaaaagcgataaaatccgatattttagtcgtttcaggccaacttttatcgaatttaatgcacaaaaaaactcgcagtttttacactacgagtttttcgattcaactaggttgaatattagtcgataatttcactaacgacaccggcaccaacagtacggccaccttcacgaacagtgaacttaagacctttttcaatagcaactggtgagattaattcaacagtaaatgttacgttatcaccaggcataaccatttctacaccttctggtaattcgataacacctgtaacatcagttgtatggaagaagaattgaggacgatagtttgagaagaatggtgtatgacgaccaccttcatccttgctcaagatataaacttcacccttgaagttcttgtgagtttggattgaacctggtttagctaaaacttggccacgttcaatgctatcgcggtcgataccacgtaataaagcaccaacgttatcgccggcttgaccttgatccaatgtcttacggaacatttccaaaccagtaacagttgtcttagcaacttcgtctttcaaaccaacgatttcaacttcgtcaccgacagtaacttggccacgatcgatacgacctgaagcaacagtaccacgaccagtaatcgtaaatacgtcttcaacaggcatcaagaatggtttgtctgtgtcacgttctggagttgggatatattcgtcaacagtagccattaattcttcaacagctttaacgtcgtcagcattgccgttcaatgcaccaagtgctgaaccgcggataactggaatatcgtcaccagggaaatcgtattctgataataattcacgaacttccatttcaactaagtccgttaattcgtcatcatcaactaaatcagtcttgtttaagaagacgatgatgtagtcaacaccaacttggtgagcaagtaagatatgttcacgtgtttgtggcatagggccatcagttgcggcaacaactaagatagcaccgtccatttgagcagcaccagtgatcatgttcttaacgtaatcagcatgtcctggggcgtcaatatgtgcataatgacggttttctgtttcgtattcaacgtgggctgtattgatagtgataccacgttctctttcttctggagcagcatcgatgtttgcatagtcttgagcttcagccaagcctttgtctgccaacatctttgtgattgctgctgttaaagttgttttcccatgatcaacatgtccgatagtaccgatgttaacgtggggttttgttctttcgtaatgtgctttttctgccattaaaacgaacctcctgtattttcgcaagaaaaaatcagtgtttagatttactaaactgataatcctttacataatattataatacttcaagcgctaaaatcaaagtgtttttttacacttgaagaattcaaaaatgattatatctgctatgagcgcgtttgtaaacacttaatgctcaaaaaaagtcagttttgaaacgatatttaggtgttttctactctaaaaatcaagtttccctgtcatttcttgcaactttttcacccagtcctgtatcttttctgaaataaccactgacgcggtataatccggacccagtaactgtttgagccatgcttgcgcccactccgtaggattatacatgatttcagcttcaaaaggatataaatatgcaaatcccatctcaacatccgccatcacttgtgctaacaaagtcggatcttcagtggctaactgctcatttaacgccgctaacaccgcattaaacgtcgggctctcctccatcaattggatatcggcaggtacaaaagtttttgtctgttcaaaccattgcatcgtgactaattgttcaatattcagctggacgagcgtttcaatgacagtcgtcttcacgaaagcatgactgtaaggattcgttaaaatgggcgcaatactggtgacataaacattacgtggtaattgttcagcctgcgtcaacattgctagctgttcagctaatgggtgcgcagtgaggttatagaggccctctgcttgcttttgaatcgctgcttggtgattcgcttggtattctaattccgcagccgtaatcatcattctaagcgtcttaatgacttgcggggcaatcgtcgcatggcgtaatgcctcccacacttgatttgccgtaataaaacggtggttattcagtaataatgcaagataaaaccgcactaaatctgtttgttgtaagtagtccgcttgttgttcttcgacgattgtcaatgctgtttgcggatcaccagcttcaatcagcgcactggcccacaataaattcgccgacaacgtctgttctagttgatacgcagcttcaaaatggtcgcatgcttgctgccaattttgttgatttaacgctactttccccatccgtatcagccgatcatactgatctggaaattgcgtaatgtcacccattcaatcacttccttttgacaattaataaaacaatagcgcctagaatcaactgacctgatccagacgctattgtttctaaatgttattcagcggctttttcagcctttggtttattatcttttctttgacgacgatgattttgattaatttccataatcactggtagaatcactggccgacgtttcgtttgttcatacaagtaatgacttaagttttcccggacatcttgtttcaaatgactccagtcaaattctttgttgtccagattattttgcaccgcatttttgataatttcggcactctcagccattaaatctttgctagtcttcacgtaaacaaaaccacgtgcggtgactttcggttccgcgataatcttcttattcttgcggtcaatcgtaacaacagcgataaaaatcccgtcttctgataataatttccgatcgcgtaaaacgatattcccgatatcgccgacaccgctaccgtcaatcatgacgtcagttgcgtcaacttgtccgccaacatgcatcttccctttttcgtaagcgacaatatcgcctttaccaacgatgaaaatatctttgtaatccattcctgtttcatgagcaatatcagcgtgtgctgctagttgccggtattcgccttgaacaggcattaagaattttggttgcattaaattcaacattaattgcaagtcattcttattggcatggcctgaagcatgtaaatcatcgccaaccgccttaacttcgccacccgcacgataaatcatatctttggtcttcgctaaaatcgtttccatcgcgtgtgaaggagatgtcgttaaataaaccaagtcgccttcttcgatgtgaattaaacgatgatgactagttgccatcttttgaagcgccttgattggttcgcccatccgacctgtttctaagatcactgtttgttctggtgcaagtgtgcttaaatctttaggttggaccaagatatcgtcatctggcaaaataatcatcgataatttcattgctgtccggacgattttttctaaatcacgacccgttaaaaccactttacggcctgttttataagccgcatcaatgacttgttgaatccgcataatatttgaagccactgaagccacaatgatccgacccgtttgatacttgaacgtttctaagatggattcagcaatatcgcgttcgttagccgttgcaaatggtgattccgcattagcagaatcactcaagagtgctaaaacaccttgtttgccaatttcagctaagcgtgcataatccgtttgatacattggcattgctgattgatcaaacttaaagtccccagtataaacgacttgtccttcatccgtcttaacgacaatccctaatgaacctggaattgtatgcgttgtcttgaagaatgaaacggttgcgcgttcaaaatcgattgctgtattcgcatcgatgacgtggaagttttggaacttacgtaattttggttcgctgctaaccgtaattttagctaaagcaatcgttaattcagacccaaagactggtacatcatgttcctttaagaaataaggaagcgctccaatcgcatcagcatgaccatgtgttaggaaaatcccagcaacacggtctgcattttcttctaaataggtcatatcaggaataacgatatcgatccccaataattcagtttctggatatttcaacccacaatctaatacataaatttcgtcgtccacttcaacaatgttcaaattcttaccgttttcacgaacaccgccaagtggcataatcttaatgttactcattctttcacctctagcacttgaggaatttattccccaaactattttgtttgttttagtcgttcattcgtttaaaactcatccgccttaaagtctaactcatattttatcacaatttaaacaaactaacagcttttgattactaaaagccttttgagcacaaaaaaagcgggtccgcataacggacccgctttttgaaaatgaattaacgacgtaagccaaggctcttgattaattcacggtaacgttgaacatcgctttcacgtaggtaacgtaataagttacgacggtgaccgatcttcttcatttgaccaacatatgaatggtgatctttcttgtgaacagataaatgttcgtttaatgagttgatttctgcagtcaatacagcgatttgtacttctgctgaacctgtgtcgccttcgtgacgagcaaattggttaatgatttcgttctttttttcttgtgaaatagccatgctaatttccacccttctggtataatagcctagaacaacgtaaagcgtcgggtgaacgtcgctaaacagagtagtaggcctgtgcaataagcacttttcaagtttactaaatattagcgtcaaaagcaaggcacagtttcaaactatttaagcagtcaagttgaaatactttacaagtttttattgcaatcactctcactattttggtataataacgactgttgaaattaaaaatcttttttataaagatagtgaaacccatcggaggtgaacaacatgccacaaattaaatctgctatgaaacgtgtgaaaacaattgaaaaagctaaccaacgtaacgcttctcaattaagcacaatgcgttcagcaatcaaaaagttcaaagctgctaaaacagcaggcaacgaagaagctgcagacctattgaaagctgctacacgcgcaatcgatatggcctcaacaaaaggcttaatccatgccaacaaagctggccgtgacaagtcacgcttaaacaaaatgatggctaaataatttaaccacaaaaaagcccccacaaccatttggtttgtgggggctttttttgctttaagcaacatcatctgtcgcaaattgtaacataaacagttcaaacaataaggttgcttcaccttgcccagtctttattttttcttcaatgccctctaaacctagataggcttgggcaagcgtcgccttagaaaagtgccgaatttgttgcaatgctaatttgatgcggtatgggtgaatttttaagacgctcgccaaattaccttggctataccctttttcaaaaagaattttcacttggagtaacaagcgaaattggcccaacaagatggcgttaattttcagcggttcttctttttgtagcaataaatcgtgatacatctctaaaaccggaccgacctttttttgtaaaactaacggcaccaattcaaaaacattatcttcaatactacttgccactaatgcactaacggccgtttcagtaatcacccggctttgttgcgcgtaaagcagtaatttgggtaactcagccataatctgactgtaatcaccattagtcttgcttaacaataacgtcattgccgctggttcaatcgtgacttgttcactttgcagttgcgctgtcactaactgctggacctggcgctcattaatcttttgaacgtcaatgacagttgccatcttcttcagttgtttaacaatcttcttgcgttcatccaacttcgcgtatggcgcgaagataacgagtgccgttgtcggttgtggctgttctaaataagcttggaatccttttaaatcatgatcaagtttagttttaactttttcacctgttaagaagaatggattctgcataaaaacaattcgtcgctcaccgaaaaagggggccgattccgcatcttctaatgcccgcgccacctccgtctgggcgagatcataactcgcaaagttcatcgtcatttcttctgtcgaaagcgttgctttaaataacgctctaacctcttcaatcagcgctgactcttgtcctaatacgagatacaccggtgcaaacgttcctcgattcagtgctgtttttagttgttctgtcttcatttagtcacaatcctttagtgttgttttaatcattggcacttggccaaaaccatagcgccattccagcatcccacagtcagccgtattccaaaatgggacgttcgcacgttttaaagtctgcaacgttgcgacatgtggatgaccataacgattatggcgtcccgcagaaatcaacgccccttttacctgccacgtcgcaattgacttgggatcactcgccgtttgactgccatggtgacccacctttaggtaatcaacacgtaattgtgggtagcgatcaacgattgccacttcacccgctttttctaaatcaccagtaaataaccaactcgcaccaccaatttgcgtttgcaaaacgagtgagtcagcattcccgcctggtccggccaccactggcgctaacacattgatttgttggtgaccaatcataaaatgttggtccgccaaataaggctcaattgcaacttttgtaagatgcggccgcacttgccgttgaaactgccggttttgcggtaagcccgcagcacaaatcaaccgtttaactcggatatgttgcataatttcatttaagtcccctatatgatcagcatcctgatgcgataatgcgattgcctctaaatgatcaatgccacagctgtagaggtaattaactgttactttttccgcccgactcacaatttgccgccgttgccacttttcttgcggtaaagctagtcggccgccggtgtcaattaacaggttatgtcgattgaagggttgttgaatcaacaggctatcgccttgcccgatatcaaacataatcacgcggccaaccggattaaagtggataccaataaaactaatgacatacaggctgataacagccccccagccccactttgctcgccgaccagtacttgccatcaaccatagtgtgcctatcacaattaaaaagagtggtattagctggattttaccgaaagtaattgtcgcatatgggaacgttgcaatccaagctaatcctttatacagcgtcgttagcaggccttcttctaaccaaactatcatatgactaacaggccataagcaaatcgctaccataatcaaacccaacatgactggtaagaaaatcggcgcgacaatcccattaatcaaaatcgtcaagatatgccaacgataattaaaccgcaagcacaccggtaaacttaacaagcctagccaaaatgccgttgtaaaagtaccatggcgccgctgataaatcaatccaaaagccatcagatagctcagcaatccccccatactgattaataaatacggctgccataaaagattgaccagcaatacccaactccaactatctaaacgcgattgctgaaaatgacttacttcgcagattaatcgtagtaagatcagcccgatagcgcgtgtaatactcgtgcctccccccacaaacaacgcataaaggggtagcaaacaaaacaagctaacattcacccattcacgcgggactcgacacagcgttgccaatcgacgaatgattgtcacaaagtagaatacatgcaatccggataaactcaataaatgaataatccccaattgacctaacacattctggtaggccaggccatctgactctcgaacaccacataacaacgcctctgcatgaaaactcaacgctggtggcaattgtcggagataaatcagcccctgttggcgccgttggtggaaccaatctagccaaccttgtggtggaatgcgtctaaagaccgttccgtcaattatatttgcttgataaaaacaatgcttttgctgccccataaagcgcgcatagtcgaactcattccggttagtagcaccttggatacgctctaattcaatatcacccgctaataataacggctgattcgtcgtttgccaacggcgtttttccgctgaactctggcagcgatagtagcaaacaacacgttggtcatcattctgcccctgcgccattaattgaatctgatcgccagccactttgatcgtatcgggttgaatcttatatacttgattatttggtctaaccggctgttcgtaggtgcgccgtgccagccaaaaacggcaaccgcctaaacacagtaccagtccactgaccattaacacagctggttggcgtaagcaccacagtcgcagtagacacactatcaaaagacagctaaaaaaaagtggtgcttgtcctagtaataacgcatttaaacttgctaaacaaataactggataaacccagttattcttaatcactcagcagtttgttcattctccaaaaagttaacgagggtgttggcgtcattcgccgttaaatcgacttggtccaattcaataccagatttttcaatcaattcatacgcatattcgtcgttatgataatccttttgataatggattttactgatcccagcttgaataattaatttagtacactgaagacatggaaaatgtgtgacataaatttcggccccttccgtctgcacaccaaacttagcgcattgagtcaaggcgttcatctcggcatgaattgttcgtaaacaatgcccgtcccgtaataaacagccaacatcgatacagtgactttcatgtgccaccgaaccgttgtagcctcccgcaataattcgccgattacgaaccaccaacgcacccacaaacaatcttggacaggtgctacgcatcgacaacaagaccgattgaagcataaaatattgattccacggcattctcttttctgacacacgaattccccctttaaagttaatagttttagtatagcaaaaaaataccattcacaaactaattaacacaaatttgtggccgtaattgttcaaacgttttcggcccaattcccccaactttttgaagatcttcgatttgtttaaactgcccttgctcatcccgatatgcaattatttgttcagcttttttaggaccgatgccatttagcgtttgcaattgtgtcgcatccgcttggtttaggttgattttagcatcagttgatatcggactggctcccgcttgattgtcagtcgcagcctgtggctcgtctgccgctttcactaattcttcggcttgcaccgcttctcccttagttggcacatagataataagttggtcactcaatgtttgcgctaagttcaactgactcgtatccgctgcttcggtcacatcccccgcttgtttcagcacctcaaataaacgcgtctttgcaacacaaatcggataaatccctggatgtgccacagcgcctttgatatcgacaaacccaccttttgagacgcttttcttctgtttgacgggttttgccttcacttttcgcttagttgattgcgccatcaattgttgattggttgatagaaaacgttgttgccgactatgctgccaaaacacaccaccaccaagtaaaattatcaccaaacaaggtacccaccagaatcgacgataccgttgccaatagtcgcgccacatttttcgccacctccttattcctaattaccccaaaacgcaaaaaaaatttgccgattctttcgaaccgacaaattttttaatgtttggctaaataatccaatgcatcgtccaagtttttgacaggaacgattttcatcttagtaccaatttttttagcggctgctttggcaatcgcataattattttgataatggggttctacctttagtatggcttttgtcacgggatcatcaggtgcgaaaaagactttggcgccttcttgactcgcaatcagtaccttcttatcaattccgccgattggtcccactgtcccatcaggatccattgtccccgttccggaaatcttgcgaccacccgttaagttttgtttcgttaattggttataaatctgtaacgtaaacatcaagccagcagaaggaccaccaatttcacccgcatcaatcttaaccggcacttttgtcacaatttttgagtgatctgtcagcgtaattcccaaaccagcgtagcgcgatttaggtaatttaatcaatttacgggtcgcagtcttacgctggccattatgttcatagctaatcgtgactttttgattcactttaagcccttgaacatacttgacgaacttatttgcactcttaaattgatgctgatcaattgccgtaattgtgtcaccaatagccagatcttttttaaaagctgaattatctaaaattgacatcacatagacacccagatattgagtgtggtattcctgatgtgccttttgataagccgcctcaatcgcaaaattaatcgagctttccatgtagtatttttgaatctgatcatacgcttcagtatcatcgtcacccattagttcatcacgactaataatctccgtaaaaggttgtgttttagacagtaatagctgtaaccccgtcactggtccttgaatcccgacggttgttaacataaagtggcccttatgctgatctcgttgaccgttaactttaacaaactggttggtattttcggccgaaccgaccccttcgacgtaataatgcgttgggataaagcaaaaagcaaacacgacgatcaagccaacaatccataggagatgcttcaatagacgtttattcttattcatattaatcactttcaggtcctaatttttgtgcaagcgcagacgcgacaaccggcggcaccaattgttcaacctggccaccaaacgttgcaatttccttcaccatacttgatgagataaaagcaaattcttgctttgctaataataacaccgtttctaaatcagcatcttgtgtctgattcaacgccgcaatatcacgttcatactcaaaatcattggcattccgaataccacgaatcaaatatcgcgcaccgacttctttagcaaaggttgccgtcaacgtcttcgattgtgcgattaccttaacgttatccaagtgttgcgtcgccgcttcaatcagttcaaccttagtggttgcgtcaaataacggttgtttagtagcgttagtcatcaccgcgataatcacttggtcaaacaagtgacttgcccgttcaacagtatcgagatgcccatttgtaaacgggtcaaaacttcccggaaataatgcaattttcggcatatagctgcctcctaaccaataaatttaaagattgctacttctgtaatcccataattctgttgccgtttcagtatgtaatgcagaatgtcagttggataatcaaccgtcgtatcggtttcgcaaagaatcgtcgcgtctggtgctaataaccccatttcgacgaattgttgtaactgaagcaacatctgttgttccttgtagggtggatctaataaaattaaatcgaattgaacaccagcatccgctagtttcaccaacgctttttcagctggcatcttccagattgtaaagcattctggcattttagtaaccgcaacgttttcttcaatcgtttgaatcgctgcatattggcgatcaactaaataagcatgatccataccgcgtgaaacggcttcaattgcgagaccaccgctaccggcatataaatcaagcgcctgcccaccgtcaaaaaattgccccaacatactaaacattgcttctttaaccttgtccgttgttggccgtgttttcatcccagggacagcttttaacttgcgacccccaaattctcctgcaataatccgcatctctattactcctctaattctgccgcatcggcaatttcttgatctgagcgtcctactcgattactgaaatccatatcaatagctggtctttcagaaggggtcactcgtttgacgtagtgtaatttttttaaccgttgcataacagtttcggcatctgccatatctacgtatagataaacatatttcattcgtttcgaggtgtaatacacaagtccgtaacggcgtaattgctttacttgtcgtaatgaatagagccagacgacaattccttggcgttgtgtgatttccaatgtcatttaatcagtccttttacatttagtcaaaaatcatcattgtttgttcatcggtacacagaagcgttaagtgctgatagcttggattattaatcgcaagttgcaacgctagattctgttgttgcgcaagcaccagcccttgggaattgagcccttgtggccaataaaaaagttgctcgcgctgcggaaaacccgctgctcttaacggagcctgtttaaagtcggttgctgttaaaaaggcgtccgtctcttgtgtcgcttgtttgcgcacttggtgcagcttttgcagtccctttttagtcaaccactgcgttggtgtacttgttaattcactcaccaaattctgtgtattttgcaatggtagttgatttatcgtgagcgcaggttggtcattattttggcgtaatgtctgcaacgtttgcaccaaagcgagttgtcgttgactatctgtttgcggttgttgcgactttgctagctcatccactgggactggtgtttttgaaacaactcgatataaatcagtttgtagcagtcggttcgcatttaaatacatcacagctgtcaatcgttcttgctgcatcactaaagttgcaaacgtctggtttttaaacatcactaacggcgtttgttggtgttgctccggcgttaaccgcaacttaaattgttgctcgtgtaacgtcactaagagcgaagttggtaacgccgtcttcttagttaatgtagcccgcttttgaaaaaaatgaaacggcgccacatcgttgtccgcaccaacaaccatgatttgttgtgtttgattggattggttatcaatcagcgcttcgacatactgtcggctatctaagtgaaataaccaccgtcgttgattttcatcagtcagctgttgctcgaccggttgcccataggttgcaattaattgttcagctggttgattaatcagtttcgccggcccttgtgttttcgtcagtggcgtttgttttattgaccgttcagtcgacggggcttgtgcaaccttaggctgattaaccgctggtgtttggataatcggccaaccataaaggatgaccaaccagacaatcaatgcaacgattaatcggcgtgccccttttatcatgctttcacctcactaattcgctgccgcagcttttttctcttgtgcgctgatgttcaacacgattcccagtgcaatcgctagaaccatcatacttgatcccccataactgatgaacggtaacgtcaccccagtaatcggtaagattcctagcaacccaccaacattgaatagggtttgcacgaaaatgatagtgccaattccgtaacataataaagtgtgatacatcttagtcgcatgaatccctaggtaaaaaatccgtgctagtagcgcaaatagtaacgcgataatcacgagggtcccaatcacacctaattcttcagtggtaatcgataaaataaaatcggtatacggttctggtaagtaaccgcgcttttggatactattgccaagccccaagccaaaccaaccaccattattaatcgcatagtaggaattcactaactgactcccacccatattttccaattcaaatggatgtaaaaacgataaaatccggttgaacttataagaattaacgttcgttgaaaagttaaagtgccgtaaaatactaaataaaatcataaccgttgttgtgaccgctgtaatcagcgaaaaaccataccaatatgacataccggtgccaaaaaacatgactaccatcacagcagccaagatactagcgccccctaaatcaggttgaataaacaccagtaggatgattccagcgactaatacaaccggactaaagaataattttaaattatcaacaaatccgtcggccagttcattttccttacgcgagagcatattagcaaggtaaataacaatcaataacttcgtaaattctgacggttgaatggtcagtggtcccaattgaatccacgcggtagccccattaatcgctgcgcttggtctgaaacgacttaacagcaataaataaatgagcgccaagaaaaccacaatcgtcattgcttttagaaaagtgcgattttttaaaacggataacttaagaaaatatgtgatcatcatcaagataaagcctaatgcgataaacactaattgcttggtaaaatacgcatctggtttcattccgcgaattgacattaaatccgaactcgccgaatagaccattaaagcaccaaatgcacataagataacatatggtagcaataaccaatagtctaaatactgaattttacttttttgaaactttttccacacagttacacctaatttctatttcgttcgtattcagcctgtccttgcccaacttgcatgccaatttgattgacccgttcttctaactcacgcatcaaagttgcaccctgtggcgcactaataagttgcatccgttttgcaaaatcaacctcgcgcgagaaaccaaataattgggtatcaattacctcttcaataattggacattgactcatacaaagcgcatcaatttgagcacgcaatagttgctcaatgcgtagcgcatccgcttctaaagtgagataagctgttgttttttgttcaatcataatttacgcctacctattcgttattaaaaagcatactctgttcgttattataccatatttatgcacaaaaaaaggtagccaagcggctacctctaatggtttttaatgattaaccttttttacgtttcttatcagctttttgacgcatacttgtgtcaagaatcttcttacgtaaacgaacagaagtaggtgttacttcacagtattcgtcatcgtttaagaattcaattgattcttcaagtgacatttctttaggtgtcttgatggcagctgagtgatctttaccagaagcacgtgtattcgttaagtttttacccttagtaacgtttacggcgatatctgtatcacggctgttttgaccaacaatcatgccttcataaacatcaacgccagcgccgatgaataattggccacgatcttcaactgattgtaaactataagttgttgatgaacccgcattgattgaaactaatgcaccgttacgacggcctggttcccagttcttaatcactggcatgtatttttcgaaggtatggttcataattccgtatccaccagtcatcgttaagaattctgttgaataaccgattaaaccacgtgaaggtgctaagaaagtcatccgtgtttggttattagcatcactttccatgttttgcatttcacccttacgttgggccattgagtcgattactgagcctgtatattggtcaggtgtgtcgatttgaaccatttcgaaaggttcgcatgtaacgccatcaatatcgcgatagataacttctggacgtgacaattgtaattcgaaaccttcacgacgcatttcttcaactaagattgaaagatgcaattccccacgacctgaaacaatccaagcgccggctttgtcggtatcttcaacacgaagtgaaacgtcagtgtgtaattggtgacgtaaacgttcttcgatcttacgaccagtaacgaaatcaccttcacggccaacaaatggtgaatcattagcagcaaatgtcatttgtaaggttggttcatcaatccgtaagattggtaaagcctcttgatggtcaactggtgtaacagtttccccaacatagatatcttccatcccagaaacagcgattaaatcgcccgctttggcttcttggatttcaacacggtctaaaccgatgaaaccaaaaatcttagttacgcggaagttcttagcagaaccgtcaagtttaagaacagaaacttgatcaccgatcttgattgtcccacgagaaacgcggccaatcccaatacggccaacatagtcgttataatctaacattgccacttggaattgaagtggttcgtcactattatcaactggtgctgggattgtatctaagattgtgtcaaagatagggttcattgtatgggcttgtgtatctaaatctgattcaagacttgatgtcccgttgatggcacttgcatacacaactgggaattcaagttgatcttcatcagcaccaagttcgatgaataattcaagcacttcatcaacgacttcttcaggacgagcgcctgggcggtcaattttgttaatcacaacgattggtgttaaatgttgatctaaagccttcttcaaaacaaaacgtgtttgtggcattgtgccttcaaaagcatcaacgactaataacacaccatcaaccatcttcatgatccgttccacttcaccaccgaaatcggcatgtcctggtgtatctaagatgttgatttgtttgccgttatatttaacagcagtattctttgaaagaattgtgatcccacgttctttttcgatatcatttgtatccattgcacggtcagaaatttctgcgtgaccatccaatgtatctgattgttttaacatttcgttaactaaagttgttttaccgtggtcaacgtgggcgataattgcgatattgcgaatgtcttctctttttttcaagtgtttcagcttcctctcgctagtgacttgactagtgttgtttgtctcatgtatacaagctattattttaccataaaaaaatgggctgtgcttcatatattagcgtttttttgaaaatacgcaagtttttttcatgaaaatttaattatctttaatcatttgaaccattcataatcgtgacaatttcttgtattgcttgctttggcgcgataatcatcccttcttttcgcatcatggaaattggttgaccatcaaattgtaaaacttgaaaacctaacgtctcagctaaaacccgacctgcagcaatgtcccatggcgctaatttggagatgtaagcttgcacttgccccttcaacaaatgggcgaaagtgataccggcgctaccgtaaatccgcacacccgaacattgatacaacacctcttgcaagtgtgcttcattggtgaccagcatccgtgtattgacacagattaacccttcttgcaacggctcgtcgacagcatttttgagggcagcttcgttttcgaatattcccaactgtggaccgccccagaacaattgatcggccatcacatcataaataatcccgaatagcggctgaccgtcttcataaacgccgatcataatggcgaaatttgcccgttgcttcacgaaattcatcgtgccatcaatgggatcaataaaaaaagttagtccctgttgccaatcatcaggcacctcaccggcaccttcttcccccactaattgcgcgttcggataagccgtcttaatcttttcagctaagaaagcttgattagcacaatcgacattagtcactaaatcattaggcccagacttagtactaaccgttaatggttgtttaatttgtgtgcgggtataggcagctgcttcaaggatccacttttgcagcgaacgacttaaccgatacagtgcttcttgttccattttttcatccactttcactaattaagcgtcattttgatttgggttcgactactcttctttgtagcctgcatacaccgatatattgaatagcctgacgcttctgaaaaggccttatcaatttgtttttcttgcatcttactttgaacaaccactttgaagtcacgataagcagcttgtaaatccgcaactttcgcaccaaattcataagcttgttcaacaagattatataatttcatgacttggacaacttcagttggcgtccagtctggttctaaaggataactatagttcgtttgcataaaggctcctaaaatttgcataaatttgcgccagtttcaattcaactgatgccattaatctctcatattataacgcacttttttagaagctgtcgaatccttttagaaatagcggaatcaaaaaacgacgcactcaactggtgcgtcgtcattctaaactatttattaaatatgaattggcaatcctaatgctaattcggcatcatccataatcgcttcacttaacgttggatgtggatgaatggttagagcaaggtcttctgcattcatgcctgattcaacggctaacgtcaattcagaaattaaatcactcgcgccaacgccagcaacttgagcgcccagaactgtgttgtcatccgtattcgtcactaaccgcacgaaaccttctgtatctgctaatgataaagcacggccattagctgcaaatgggaacttaaatcctttagcgttcattccttttgccttggcttctgcaaccgttaaaccggtcgttgccaattcaggatcggtataacaaacagctggcattgcgtggtaatcaaccgttactttcttaccggcaatggcttctgcagccactttagcttcataacttgctttatgcgccaaagctgctccagcaacgatatcgccaatcgcatagatgcccttaacgttagtttggccttgttgatcaacttcaatcaaaccacgatcagccatcttaataccggcttgttcgagtcccatttcgtcggtatttggccgccgaccaacagtcaccatcacgtaatcggcaacaagttgttcttctttgccgccgacttcatatttaaccgtcacattttgatcagtttcaacagcttcttttgccattgcgccagtaatcacatcgacccctttagccttgaagttctttgtcaccaattgcaccatatctttttcgaagttaggtaaaatcgagtctgtcccttcgagaatcgtcacatgtgcacctaagttggcataggcccctgctaattcagagccgatatagccaccaccaatgaccactaattcttttggtacttccgttaagcttaaaccaccagttgaatcaataacccgtttattaaatttgaagcctttaatttcaattggacgactaccagtagcaatgattaaatttttaaaactgtacgtttgtgcactctcttctttaatcacgcgtaagctatgttcgtccactaaaaaggctgaaccgtctaacacatcaatcttgtgttttttgaacaacattgaaatgccaccagttagtttttcaacaacctcatgttgtttccagtcttgcgttttcgcaaaatccaatgttgctccagtagtcgtcacaccaaagacagatgaatctttcgcctcttgtagtcgatgaccagctgaaatcaaagccttggaaggaatacagccgacgtttaaacaaacaccgccaattgtttcacgttcaatcacagttactttttgacccatttcggccgcgcgaattgccgcaacatagcccccaggacctgaaccgatgactactgtgtctaattcaattgcaaaatcacctacaaccattttaaaatcatccttccatcaataatagctctggatcagctaataattcttttaattcgttcatcgcacgttgcgcagttccaccatcaattaaacgatgatcaaatgatagtgataatttcaagactttgccaacagccaactcaccatcagcgttgacgattggttctgtcccaattcggccaacccctaagattgcaacttcagggtagttaacaaccggtgtaaaccaaccgccaccaattgatccgatattactgattgtcattgaaccaccactcatttcagctggtttcaatttgttatccaatgctttttgcgtattttcgccaatttctttagcgatggcaaaaatactcttgctgtcggcatccttgatatttgggacatagagcccgtgatcagtatccgttgcaattccgacattaatgtagtgtttataaacaatttcgttagttgcatcatcaattgacgcgttcaaagttgggaagtcacgtaagaccgttaccaaagctttaacgatgtatggtaagaaggttaacttaatgtccttcttagccgctacatccttgaatttcttacgatgggtcatcaatttagaaacttccacttcatcgaataaagtaacgtgtggtgccgtatgcttgcttgtcaccattgctttagcaattgctttccgcgttggtgacattttttcacgtgtttcccgttctggtgtaacagaggtgtatggtgtcgcagcaactggttgtgcaactggtgttgctggcgacgttggttgttctgctgtctctacagcaggtgctgtcgttgttgcagcgccattttgcatgaagatttgcacgtcttctttagtaatccgaccatgtttaccggtggctggcacttgactgatatcaacatcgttttcacgtgcgaattttcgaacagatggcatagctaaaatcgtccgattttggtcactaatcgcaactactgcttgactgcttggcgccgttgttttagctggtgttgattctgacgccgtagctggtgcttgttcagcagatgttgccgttgccgaattgtgacctggagcatcaatttcgaccaatacttgaccgacagtcgccacttcgccttcaccgactaaaattttaacgactttcccactaacaggtgatgggatttcttcaactgatttatcattttgaacttctaataaagtgtcatcttcttgaatggtatcgccttctgcgaccgcccatttttgaatttcaccttcggcaatcccttcaccaatatctggtaatttaaattggtaaacaccacctgcatcggttgcagtcggtgctgcttcgggtgtagcagctggtgttgccgtacttggtgtatcgttaccttcaacacctggtgcgtcaatttcaaccagtacttggccaactgttgccacttcaccctcaccgactaaaattttaacgactttcccactaacgggtgatgggatttcttcaactgatttatcattttgaacttcaagtaagacatcatcttcttgaatcgtgtcaccttctgcgactgcccatttttgaatttcgccttctgcgatcccttcaccaatatccggtaatttaaattgatatgccatacgtctaacgtcccttctttcgttatcgactaaaagttaataacttctttaaccttattttcaatatcagttgcatttggtaaccaagttgcttcagcttgtccaaatgggaatggcgtatcaggagctgaaacacgtgcaattggagcttccaatgaaagaacagcacgttctgaaatttcagaagcaacttgtgccccaacgcctgcttgtttttgtgcttcttgaacaataacgacccgccctgttttttcgacagaggcgataattgttgcaacatctaatggtgcaattgttcgtaaatcaattacttcagctttaatattctctttagctaggttttcggccgctttaatcgcttctctcaccattgcaccgtaagtgatgattgaaacatctgtcccttcagtaaccacagctgctttatcaagcggcactgtataagattcatcaggtacttcttcgcggaacgaccggtataatttcatgtgttcaagatacaaaacaggatcgtttgaacgaatcgcagaaatcaataagcctttggcatcatatggattacttggcacaaccacgcgaatccctggaatttgcgtgatcattccttcaaagttatctgaatgtaattctggggtatgcacgccaccaccaaatggtgcacgaatcgtgattggcatgttgcgtgtgccacccatccgataacgtgtccgtgacatctggccagcaatcgaatccattgtttcgaaaacgaaaccaaagaattgaatttcaggtacagggcggaagccttctagtgctaaaccgattgataaaccaccaatcccagattcagctaacggtgtatcaaaaacgcggtcttcaccatgtttagcttgcaacccttcagttgctcggaaaaccccaccgttcttcccaacatcttccccgaaaatcaagacgttcttatcatctgcaagttctaaatccagcgcatttgtaattgcttgaatcatcgttttttgtgccatcttaattcgactcctttgcactgtactctgcgatttgttctttaatgttttgtggttggtcttcaaatgtaacattcaagaaatctgtgactttttgttttggcgcagcatccgcttcgttgatggctgctttaatgtctgttttaacttgttcgatcaattggtcttcttgatcttgtgaccaaagtcccttatcagttaagaaacgacgcattctaacgagtggatcacgtttcaaccaaatatcgtctgtttctttggtccgataacgagtcggatcatcccctgataatgtatgtggtccataacgataggttaatgtttcaattaagaccggtccgttgccagcagttgtaaattcacgcgcttctttcatcacttcataaactgctagtggatccatcccatcgacttgaatggcaggaatcccagctgcgacccctttttgagccaacgttacagcagctgtttgtttttcacgtgggaccgaaatcgcaaagccgttattttgaacaacgaaaatggctggtgctttaaaagcacccgcaaagttcaagccttcatagaaatccccctgtgaagtcccaccgtcaccggtataaacgtaaacagcattttctgattggcgcttcttcatcccaaccgcaacacccattgcttgaatgtattgcgcgccgataatgatttgtggtggcatcgccttcaaagattctggatacttgttaccgtcaatatggcctcgtgaccataggaatgcttgtgataaaggtagcccatgttgcactaattgtggcacatcccggtaaccagggaataaaaagtcgtctttagtcatcgcaaagttacttgctaattggctggcttcttgcccagcagttggtgcataaaatcctaaccggccttgacggttcaaagcagttgctcgttgatcaagcacacgcgaccaaaccatttgtttcatcagttcaaccaattggtcatcactgagatccggcatcaattccggattaacaacctggccagtctcatctaaaatttgaacggtcttaaaatcttggctctcatcgctcaataacttttcaaaattaactgcagctttattattgaccatagtatccatatctcctctttaaaaaactgttttaatgactgcttatatctgtattacttaagcatctttacaagactaatttagcatttcacatcactaaatgcaagcgttttataagctatattagtcagtttacgctttcattagtttttattacatgtgaatctaatcactagttagctaattttcacgtctgttctatatctgttataatttaatttcgttttctgttatataatagcaaataataggcacaaaaaaagagtccgccgtagcagactcatcgttaaatttaagttggggtagttctatgccaagaccggttggggtatctcagcgttgccagcatgcactaagagctcttgaaacactctgactactggtttaatttgttgactgacttgcacgcaccgttcacttacccgcaaatcatttaaatcaatcgcaaccttaatttgaccaaggttgactaacttaatcattgtcagcaggattgccccgacaaccaacgttgccaagcccatgaaagcgaattgattaaccattaatactgcacaaaacgaaaccaatgcagctaccgccatcataaaagtgcttcccactctaactttaggtgtttgtgctttagcaccaatcgttgcatctagcacaacgccgtgcaccatttcagtcactgcttcgcccgcttcaataacgttaacatctttgttaactgttgcgattgtaacgggtgtcttttcgctagcagccaatactaaaatatcaccgggcacaatttgatctgcaccgattaagcgtaaaaaaccatcacgcataacgctaacccgtgcttgtgaattttctaatactgcttctcttttagcagcttcgacagttgttaagccacttggccgagttgccaataaacgcattaacatcccactgcttgtaatgccagtgatgttaacgtctttttttaatttcttgtgcatcgcgttcgacactccttcccttttgaggaagtcgtcgtaaaccgctagcctaatgctggcagtaaaatgacagaccacctcgaatgatcaccatcgctactacttacaggtccttcagctgttttcatcattttactcaccagactttctctactttaaatttagtcataccgctttatccgacaaaaaaagacgcacaacaattgagcgtcatccatttatcatggcgttcccaatcgttcagttttagcactatatgacgtagaaaccatgttcagctacgttagaaaaagccttcattggcagtttcagttgactcaattggcatctctcgatgtttctgagtagcagcgtttgttcatataggagcctcacctaacggaaaagcaatatatctatactcttatactacccgtttcactttagcaggtcaagcaattcattccgttttaacttgaattgtgctagaataatgaatgacgaattaatcggaggtcttaactgtgatattaatgaaagatattatccgcgagggtaacccaacacttagaaaaatagctgaacctgttacttttccgctatcagatgaagatcggcaacttgccgctgacatgatggcatttttagaaaatagccaggatcctgaacttgctgaaaagtaccacttgcgcgctggcgtcggtttagctgcaccccaagtagatgtttcaaaacaaatgtctgctgtcttggtccctggaccagacgaacccatcttcaaagatgtgattatcaaccctaaaattatcagccactctgttcaaaacgcagcacttgctgaaggtgaaggttgcttatcagttgaccgcgaagtgcccggctttgtgccccgccctgaccgtattacactacgttaccaagatttagacggtgaaagccacaagattcgcttaaaaaactacccagctattgtgtgccaacacgaaatcgatcatctaaatggcatcttgttcttcgatcacatcaacaagcaagacccattcgcagcaccagatgacatgattattattgaatagaagtgcgattggttgtgcttagcaactgagcattaatacagaattggcagttatcccgaattgtgggataactgccaattttagattaaacgggagttgttgcacccaagcgcacgttaaagaagaagtgctgattcgagttggtcaggctttgaggcttaacggtaaaggctactcgagaagcacataaaaaagcgtgattgaaatctcattagaagatttcgatcatgctttttttatgcttccgccgcttcaggcgtatcggcaaattgactgttatataaattagcgtacacaccgccggcagctaatagcgaatcgtgcgtcccttgttcaacaatttgaccatggtccatcactaaaatcaaatccgcgtcgcgaatcgttgagagtcgatgggcaatgacgaaactcgttcgcccttgcatgactttttccatggctttttgcaataaaccttctaatcgggtatccaccgaactagttgcttcgtccaagattaaaatcttaggatccgcaatcacggctcgggcaatcgtcaatagttgtttttgcccaagcgaaacgttgcttgcttcttcatcaatcgtcatttgatagccgtttggcaacgtatggataaaatgatcgacattagcggttttagccgcatcaacgacttcatactctgtcgcatcgagtttcccgaaacgaatattatcggtgattgaagcatgatataaccaagcatcttgaagtaccatcccaaattgggaacggacttgttgcttgcttaattgcttcgtgtcaaccccatcaatccgaatcgttccagatgtcacatcataaaaacgcatcaacaagttaatcatcgttgtcttcccagcaccggttggcccgacaatcgccactttatcacctgggttagcagtaaagctcaaatggcgaatcaatggtttgtctgggttatagctgaaactgacatcatcaaattcaactttaccttgaacgattgctggcaacgatgctgtttcattatcggttgcttcaactggctcatctaagatttcaaatacacgaccagttgcagcagcagctgattgaatcacaccagacaactgtgtaatctgtgagattggttggttcacttgccaaatatattgaatgaaggcttgtaaattaccaactgaaatcacaccgtgcaagacataataaccacctaacgttgccatcccggcatacgtcatgtttgtcgttaaaccaactaacggcatcatcaagccagaaacaaaggctgccttaaagccatagtcagttaaccgatccgtaatttctgcaaaagcagcaattgcgcgttcttcttgtccgtaaagtttcaagacactgaagccgccataattttcctgtacaaagccgttcatttcgcccaacgtgtcttgttgtcctctaaagtacggctgcgatttctgaatgacccgtcttgaaatcaataacgatgctggaatcattattaatgataagagcgccatccaaatattaatcgtaatcatcatgatcacggccgtgatgatccctaagatcgatgtcacaacttgaattaaactctgttgtaaagcgttcgtaatcgcgtccacatcgttggttacccgtgacaagatattcccttgttgttgtgaatcaaaaaaacgaacgggtagcgcattgatttgcaaatcaatgtcgcgccgtaaatcacgcatcgcccgttgaacagcccgcgtcatccaaaacgagcctaaaaacatcgtcacttgatatagcaacgcaaagctcaaaatcatcgcaatcaccttcgcgatataactaaaattaatcgcaacgtgttgtgctaaattccgactgatttcagtaatggctagtcccatgatcactggccacagtgcattagcgagcaccgaaataacagttgcggtaatcgcaagccaaaatgtcacttgatacggcccaatgtagcgcattagccgtttaagttctctaatattcttcattgagttcctcctgtgataactgtgatgccgcaatcgcacgataaatctcgttatcttttaataagtcgcggtgagtcccaataccaaccacttgaccttcgtttaagacgacaatccgatcagcattcatgatagtcccaactcgttgtgccacaatcagcactgttgcctctttggtgattgacttcaatgcacctcgtaacgccgcatccgttttataatccaatgctgaaaaactatcatcaaagatataaagcgcggggcggcggacaatcgctctggcaatcgccaaacgttgcttttgaccaccagataaattgctcccaccttcggctaaataagtttgtaagccgtctggtttttcagcgacaaaggtatctgattgtgcaattttcaaagctgtccataattcttcatcagtcgcattcggattaccataacgcaagttttccgcgattgttccggtaaataacaccgctttttgtggaataaaaccgatcttttggcgcaacgccttaagttgatagtcgcgcacatcatgaccgtcaagcttaatcgatccacgtgttacgtcaaaaaagcgtggaatcaattgaatcaacgttgacttaccactcccggtactcccaataaaggcaaccgtttcacccggatgcgcttggaacgtcacatcccgaacgaccggactttcagtcggacctggataagcaaaggagacattatcaaacaccaattcaccttgtgtgtcggttgttgttaccccgtcttctttttcggtaatattaattggcgcattcagaattttttcaattcgttctgctgaaacagcggcccgtggatacatcatgaagacactggcaaataacataaatgaaaacagtacgtggaaaatatattcaataaacgcaatcaacgtcccaaccgctaagtgaccaccatcaatctgaacagccccttgccaaatgattagaacgaatacgatattaaagatgaacgaaaagcccggttgtgctaaagccaccaacgtaaacagccggatagaactatgactgtagtcatcattcacttttctaaagcgtaatttctggaattgttcccgcacaaaagcacggacaacacgaatcccagtcaagttctcacgcagattcagattaatcgcatccagatttttttgttgttccgtcgacatcggttcagaaacgcgaccaatcaagacaacccccgttagcaggattggaattgccgcaaatacaatccatgagagcgattgacttgtccgtacaatcatgaaagcactcgcgacgatcatcatcggggtcataaaccctgtccgcaacacttgggtcataaattgcatcacctggaaagcatcattagtggtccgagtaatcaaagaagacacaccaaattcgccatactcactatgggaaaactgcatggtttgtttaaaaatatcgttacgaatgtcacggacgatattggtggttaatttgctaccagtataagccaagccaattaagccaattagtccgattaaacagattccaaccatcaataacccaaattgccacacaggaccaaaggtatgttgattaattcctttatcaataatttgtcctaataacgttggtaatcccaattcgattagaataaatccaaatacacaaataaagttccaaaatagtaatttcttatatcggatcgtatagcgccacattaatttcatcggtgcaaactccttctaaacttcaaatttaatcttctacctgtgccatatctttaacatactcgattgtttcgcgattgacaataaaagcaacgtcaaaatgcaattgtttttccaaaaaccacacatcagtgactagcaaagccggataacgcggactgacggaggcaatccgccgttcgtaagccacttcattgagttgttcctcaattgcggctgccacatcctttaatgcagatgatgtttgtcggatgggcacttggtattcgaagaccatcacattattgccccaaatttcagtgggcaggttcgaaaccagtttggcttgcggtgcataaaaatccggctgactcgcttgcattttttgataagccaccgttgcaatttcatccgcaatttcttgactactgtgttgtaaaatccgcgtcgctctttgtcggcgtaaccgtttaatcaaccaggttaaaaaaagcgctaacgcgacaatgataacgactgacaaccaaattaacataacaatcccccacttctattgctcactaatatgataattataaccgaatcgaggcaaacacgctatttagagcacgtcgctcaatgtatactttaccgaaaagatatgctaaaatattcttaaatgttgagtaatcaacccctggacggttaatctttcgtttaaaactatgatgaataataaaggagttttacaattgatttataaagtacttttccaagcagacaaaacccaaagccctctacgcgaggcaactaaatcgatctatttagaagcagacagtgccgttgaagcacgccaacttgttgaagacaatactccctacaatattgaatttgtacaagaattatctggtaagcaccttgcttttgaacaagaatcagaagattttaaattaacggagttttaattaaatgaaactcgatattaagaataacgaaaccgccgttttcgccgtagggggacttggtgaaatcggtaaaaatatgtatggtgttcaattccaagacgaaattattgtgattgatgccggcattaaattccccgaagatgaactcttagggatcgattatgttatttcagactatcaataccttcaaaaaaatcaacaaaagatcaaagccctcgtcattacccatgggcatgaagatcacattggtggtttaccttacttcttgcaacaagtccctaatgtacccgtctacgctggtccattggcacttgccttgattcgcggtaagttagaagaacacggccttttgcggtcaacagaattacacgaactaaacgaagataccgtccttaaattccgcaaaacaagtgttgatttcttccggactacccattcaattcctgatactttaggggttgcgattcatacacctcaaggggtaatcgttgaaactggggatttcaagtttgacttgaccccggttggtaatcaaccttcccctaatcttcaaaaaatggcacgtttaggtgaagaaggcgttttatgtttaatgtctgatagtaccaatgccgaagtaccaaactttacaaagtcagaacgtttcgtcggcacttcaatccgccatattgtggaacgcattgaaggtcgcattattttcgcaacgtttgcttctaatatttcacgggtctcacaagccactgatgctgcgattgctaacggtcgtaaaattgccgtctttggtcgcagtatggaagcagcggttgtcaacggtcgtgaactcggttatttaaatattcccgatgaagctttagttgatgccaatgaattaaattcgttgcccgccgacaaagtgatgattctatgtacaggatctcaaggtgaaccaatggctgctctaagccggatcgccaatgggactcaccgtcaaatttcaattcaacctggcgacaccgttgttttctcaagtaatccaattcctgggaatacaatgagcgttaaccacgtgattaataagctttcagaagctggtgctgaagttattcacggtaaagtgaataacattcatacgtcaggtcacggtggtcaagaagaacaaaaattaatgctccggttaatcaaaccgaagtacttcatgccttgccatggtgaataccggatgcaaaaaatccatacggaactcgctcaacaatgtggtgtggaacctgataactgcttcatccttgaaaacggtgacgtcttagcactcacttctgactcagcacgggttgctggtcactttagcgccgaagacgtttacgttgatggcaacggaattggcgatattggcaatgtcgtgctccgcgatcgtaaaatgctctcagaagaaggtttggttgttgttgtggcaactatcaatcttggtgaaaagaacattctcgctggtccagatatcctctcccgtggtttcgtctacatgcgtgaatcaggtgaattgattagcgaagcccaacgccgagttttccgaatgatcgtcaatacgtttaacgctaacgacaaggtcactgaaaaccaagtccgcgaagcaatcattgatggcttacaagacttcttgtttgaaaaaacagaacgccgcccaatgattttaccaatgatcattcaaagtacagaataataagttttgcgccaggtcaatatatgacctggcgctttttttattgtttaatgcaagtttttattgtcaacatttggtaaaaaccgctataatatacaacagattactttttctgaaaggcggcttgttcatgccctccaatccccatttttacatcattttaaaccaagttgccggtaccggtcaggcagcgagtatctggcctaaaattgaaactcaattaaaacaaaaacaaattcactatgaccttcaactctcccactacgcaggtcacacgacccaattggccttccaatttgcaaagtttaagtacacggatcaaattttattaattattggtggagacggcacgctcaatcaagccatcaatggtctccagaatgctcagcgcggcgatattccgattgcttacattccttgtggatcgggtaatgacttcgcccgtggtgtcgggattagtcgtgatccattgaccgcactcgaacaaatcttgtcggccacaatgccaactgccatcgatttaggttattatcatgacacaacgaagaacgaccatggctacttcgttaacaatgtggggattggttttgatgccaacgtggtcagcaccaccaatcattcaaatcataaacgacttttaaatcgattgcacttaggctcattagcttacatcagctcattggttaaagtttttatgcaccaagatgcgtttgaagtcaccgtcacggctgatcaccaaaatcattattttaaacgtggctttttagtgaccaccactaaccatccctactttggcggaggggtccccatcatgcctagcgcaacggtcgacaaccatcaacttgatttaattgtgattgaaaaattgaatccctttttcttttgctatctttttgtgatgatgctgtttggtcggcacacacgctatcaagcggtgcatcactttgaaggaaccaacttagcgattcaaacaaaaacattagaattcgggcaaatggacggtgaagaacttggtagccggacatttgatattcactatagtcttaaaagccaggcattttggctaaagaagcaagcataaataaataaaaggcgctgcctccaagttgggggcagcgccttttaacgtgctcttcaaatcatgttcctatgcctagcaacacaaggctagtgcacaaaagttgaccaaacttgaatgcactcatttctttagaagtaatccgagaagtatggttggtccattggaataatattctcgagattttttagtgcttgtcggttggcttgtagtctttcaatctttgccaagtatgatgggcgtcgatagctcatcagcattgttgttagtgtctggatgtcgcattgaattcgttcaccgactgggcgacttgtgacctgcacttttccttgttcatcccaataaacgccaaacgtaccgttattccattcagctaatggatcggtcaattcaatgtggaatgcttgcccgtccgtttcaaacggataagccaacaagaattcacgcacatcaacaatccgcgccataaaatatggcttaatcgtctggtcaatatcaccatcttctaataagaatgaaatcggttcatcctgatattgattacccttgacatgttcaatcattgaataatgcgcgccaatgaagttccacagaccaatccgggcttcttgattaagataaatcatttctttaatatggaagacttcgttggcaatccagtataaaacatagccggtgggttgttcattttcatcataataaacaccagcaatccgttcttcttcattttcccaacgccaatattcatcccagttcagttcgttacgaatcattgcaccgtgattttttagtgcaaaccgttgatacgttttaatcacgtcttcatcgtcaatatcaaggcgttcaacgtgcccatttaccggccgttgcttaggtaattggctatcacgaatatcataagttaggtgatcagacatgatctcccaccctttcttacgataaaacggaatgctgtatggatataaatacgatatccactgcttattctcacgcatcttgttcaagccgactttaaccaagtcatgcatcaaaccatgaccggcatattccgggtaagtcccgacaccagtcaaaccacccatgttaaatacctggccatgaatgttcacgcggcaatgatagatggctaattgtgaaatcagttcgtccccattaaaccatccgattacgtcagatttttctaatacgggacgtttggcgcgttctaattcgccctcttcgtagccactatcagaaacttcctgatcggtgacttgaaaaacataccgtaataagtcattaaattgttctaaatgttcaattgtcacgggtctaatctctaaattagatcgctggtcaaccattgtttcgcctcatttttcgttagttgtttaccctattatacactattttgatttcggcataaaatcgtacggtgtcaccccggtcatcccaatcattggatccacttgctgttgcgttagaacagtcggtgttaagacataactgattggcgtttcttgtattgcgtcgtcgtcttctggcactaagttcagttgttcatcaacagccgtttctggcgcacttggtggtgccggctggtcaacaattattttggcttctgtctgccccacactggccgtcttaatggcggtgctgagttgttcaccgttaaagacactttgaatccgttcttttaacgtcgtttgccgattggccgaaagttcctgagctgctttttggaaagcactcggttcaccaatcagaatcaacaatgatttagcccgcgtgactgctgtgtacagtaagtttcgcttgagcattcgttggtattgattgaccaatggtagaatcaccatttcaaattcagaaccttgcgccttatgaatcgacgtacagtaagccaatgtaatcttgtgccactcactccgcttataggtcacttctgcactatcaaaagcaatggtgatctcgtcaaccttgtccgcactctttttagcataggtaatccccgtaatctgcccgatttcaccattaaacacattttgttccggactattgaccagatggagtactttatcgccaatgcggtagtgaacgttaccaatgctaacttgttttttgcggtcatctagctttggattcatgatattttgaatcatcgggtttaactgatcaattccggctgctcctttgtacatcggcgctagcacttgaatgtccttagtttcaaaaccacgcgctttggccttagtaacgacttgttcaatcaccgattcaatttgatacggattacattgaatgaaactgcggtctttttgcggcttcaacaaatccgctggcagttggccttgattaatttcatgcgccaacggaataatcgttgactggtcatcttgccgataaatacgttgtaattcaaccgctggaataaccttactctgcaataaatcaaagaaaacttgccctgccccgacggatggtaattgatccttatccccaaccaatacaacctgcatatgactgggcaccgcccgtagtaatgagcgaaacaagtaagtatcgaccatcgacatttcatcaataatcaataggccgccttccaattctttgttaccggaaacatctggattattttcgcggccagtgattccgagtaagcgatgaattgtactagcaggcaaacccgttgtttcactcattcgttttgcggcccgacctgttggagcggccaataaaatcggaaacggcgtgtctttgtactcattaatatctaatgacagcccgtttaattcagcgtataatgtcacgattccgttaataatcgtcgttttcccagtaccaggtcctccggttaataagaacgcccggtgagtcatcgcaagcttaatcgcctcttgttgtacgtcatcgtatgtcatcttaaaccgtttttcgaggtggcgaatttcttgatctagatcatgtttaggatagctaagttgatcgcgttcattttcaattcgcattaaatggttcgcaatttgccactccgcattaaataacccattcggataaatccgattctcatcaccaacgactttcccatcatgtgcaagtgccatcagttgttcagccaccaagttcggatcaatagcaacattgcgtgctttttccatcaactcaatactagctgccaataacggcttggcctgggtataggtatccccagcttgattggtcaactcatttaacgcttgcattaaagccccttgcacccgcacggctgaatcagcggcaaacccgagggtctccgctaaattatctgcacgtttaaagccaatcccagcaatgtcagccacgagttggtacggattttcttggataatcttcagcgtatcttcatggtaggtctgatagatgttataggccatcgagctcccaaaaccatagttgtttaagccaataataatctgttccatcccattattaatcgtcagcgtttcaacgagttgtgcttgtttcttcgcatttagccccaatggttctaacgccgtcggatcctctaatattttatcaatcgcgtcaattccaagagtatccacgattttttcggccgttttctgcccaatgcctgtgaatttttcgccagacaaataagcgactaagccggccttagtcgttggttggtccacttggtaattatcggcttgaaactgtttgccatatttaggatgagtgaccactttgccatagaaggtatatcgttcatcttctttaatgtcgccaaaactcccggtcaccacaatttctgtttcgtgccagtcaatcgtcttatgtgctactttaacgagtagaattttaaaaaaattatccgggctctcatagaaaatactctggacggttccggtgactgttggtttggtttcgtctgtttttgctatatccacaatcgccatcccttattctttttgctctttagcctgcatgaagccttcaatatcaattaactgttgtttattctttttaaaataatccggtgcatagtgcttggcttgttcgaaataaggctcactatcagcgcctaagaccagttgcgtcaagccatacttaaataatacttcaccattttgaggtgcaatggtcaatgcctttttaaggtaggtctgcgcttggtcaaaatcacccaagctcgttaaaatatcgcccactaaaagattggcgtctagttggtctggttcttgttcttgaacggtcaacgcgaacgccaatgcccgtggattctgttcgagttgatgatatgtctgcgcaagcatatactgcgcatctgttgattgtgagtcttgcaccaactgcatgaacaagggcaccgcttgttgataagcttccgcttgataatagagtgttcctaatgcgtaagtcaatgcagcttcattatgaaattgcgtcaacgctttttgcaaaagtgcttcagcttgttcaaaatctttaagcgtcgttaaaaatgtcgcaagggtaacgtaagcttcaatgtcttctgagtgatcttgtaaatattgtacgagatctttaacagcggcttcgtggtcgccagcggcccattttgctagaattgcttgcacgtgatcatctcctatatcgtatctgttgcggataattgcttgctgaggaagtgtgtatcattccacttaattagtttgaaagatgctccttgatcgtcagttgtcatcgtggtcacagatgaatttgtcacaccgccgtctttgcggacctgagccaatggtgtcttgagtaaggactgcatcatcgccaccatcgctgccccatggctgacaataataatatgatcagtcggtttagcagccttcacaatcgcgtcaattgcttgcgttgtccgttcaatcacttgttcaaaggtttcccctttaatttcagttggatcatactccgctggtgcttcacgaaaggccttcacgattgtcggatattgtttttcgacttccgtaaagcgcatcccttccattagaccgagattaaattcgtggagtgcatcaacaaccgtaatcggaaaatcctgccctaagtctcgttttagcgccgcagacgttacctgtgtgcgttttaacggactcgtatataaatgatcaaaatgaatgggctttaaaaatgtggctaattcttcaatttcaacgtaactactgtctaataatggtgaatcaccacgtgcaccttgatagcggccttccaaattccattcagtcttaccgtggcggataaaatataaggttgtcatgcgttctctccttaaaataacttacttttcattatgaaagagttacgccctaaattcaagtcaatcgactaataaagcaagcatttttcctgtaaaacgccatcaaaaaaaccgctaggataaaaatactttttatcctagcggtttcatctattagttgctctaaacgtgtttcagtaggcatatttctgcggttaaccctatttgccaaatccagttaatcctcaaaatatgaacgcttacttacacactcttttatttactttctgcgacagcttgcattgcaattgcgttgacgtagttgactggttgatcgtagtttggttggaagaacatgtcaaccattgctaattgatcaatcgtcatcttcgtttgaatggccattgaaatgacgttcgctgcttgagcaatatcatacatacttgtgaatgaaccacccaatacttgacgcgtcttaggatcccacattaagttcatcaaaaccggtgtcgttgatggcatgaaatcagggcggtaatcttgttctaacgttgttgtagcgacttcaatcccacgcactttcgcgccttcaactgttaggccactccctgaataggtgcgaccaaataattcaacggcagaagttgcttgcgtgcccatgtacttttcagttggtgtttcgatgttgcggccgattaaaaggccttggcgaacagcgttggttgccaatggaatgtaatctgctttttgtgttggattgtaatgaacagctgctgaatcgccggctgcataaacatccttaacagacgtttgcatgtattcatccgtcaaaatcgcaccgttacctaacatatcaacttgccctttgaaaaggccagtatttgggcggaagccaacacataaaattgcaatgtcggctgtgtattcgttcttatcagttttaacagtgacttgatccgtccctgagaaactgaccactttttcgctaagcgcgagggttacaccgtggtcacggtaatcttgttccacgatttctgagatattaggatcgaaattcttgccgagtgcgtgtggtaatgcatcgattaatgtcacttgcttatcagttgttgcataggcttctgccaattcggcaccgatgtaacctgaaccaatcacgataacactcttcacatctggggcgctcttcttcaattcattggcatgcgcccagtttttgcagagcttaacgttcggattgtcaatgccttcaattggtggaatcacaggtgatgagcctgttgtgacgatgattttatcaaatttttcggttgtttcttcttccgttactaggttcttaacgcgtaatattttttgatctaagtcagcttctaaaacagtgtgttgcatcttcatgtgagcgcccgcttgcgctaacatttctggatttgaatagaacattttctgaggatcggctacatggccgcccacccaaagggcaatcccgcatgataagaatgataaattatcgtgtgtttcataaaccgttacatcccaatcaggatgttctgccaatgttgcttgtgttgcaaatgtccctgcgtgtgtacaaccaataactgctactttcatcatgttacctcctagaaatatccaaaaaacgacggttaatcgttgagaatttgtgaaatattacgcaaccagcatgtaactatattgtacgctacttagtttcggaaagtcaattgcctccagctattaaattaatttcacaatctaaaacgaataaccacttatgttttaaacgttatattgtgattttattctaaaaaaggtcgttgaccacttattgaacaaacccacaaaaaaagtgctgataaatataaattcatcagcacttttaacgattaaattagatatattgtaatactttcatgtcagcatcatcgttcgcagccttataagccacgtcaatcgtgccgccacctaaacattctgcgccgtcataaaagacaaccgcttgaccaggagtaatcgcacgcactggatcatcaaagacaaccgttgcagttgtgtcagatgtcatgtggacggttacgccgacgtcttgttgacggtaacggaacttagccgtcacgtggaaatctgtcccatgatcaactggtgtgatccaagaaatattacttgcatctaattgatcagcatagagtaattcattatggtagccttgaccaacatataaaatgtttttgtctaaatctttaccaacaacgaaccatggatcattggattcgccaccgccaccgattccaagaccggagcgttgaccaatcgtgtagtacattagaccgtcatgggtgcctttttcaagaccgtcgaccgtcatcatcttaccgggttgtgctggtaagtattcgcctaagaattgcttgaagttccgttcaccgatgaaacaaatcccggttgagtccttcttcttagcagttgctaagccagcctcttcagctaaccgacgcacttctgctttttgcatgtgaccgattgggaacattgatttttgtaattgatcttgagaaagagcgctcaagaaataagtttgatctttattgctatcaccgccacgcaacatgtgcgcgatgccgttatcatcgcgttcaatctgagcatagtggcccattgcgatgaagtcagcgtctaattccattgcgtaatctaagaaagccttgaatttcacttctttgttacacatgacgtctggattaggcgttctgccgtgtttgtattcgtctaagaaatattcgaacacgcggtcccaatattctttttcgaagttgacggaataataaggaatgccaattttagaagcaaccttggcaacatcctcataatcttccgttgcggtacagacaccattttcatctgtatcgtcccaatttttcatgaaaacaccaatcacatcgtatccttgttgctttaacaacaatgctgtgacagatgaatccaccccgccgctcataccaacgacgactcgtgtattactgtggtcaaccacaatatcaccatcatttcaaatagattctagttttctacgatttgaaggtcgtgaattccagtacttaacattatagcaatcttggttaatatttcaaactaaaacactcacttttcataagttaaacgtaaaaaaagcagtttacctatcaaactcctggtaaaccgctcttaaaacgttatttagccttctttaattaacacttcacgtgccactaagttagcaataataaaattaaattgttcgacgttttcagcattcttttcactcttgaaaatatcgactggatgtaagccatctggagaggtgacagacatcttcaacgtctgtaactctttaccaattgtcatcttcaacttaatcgcactgttaaatggtgaattaggatctaatggccgttccatctggaagttaccattgtttgtgggcacaaagccaacatctcttaatgtgtattttttaacggcgggattgagtcgatattgcaccgtactccccaaaaccgttgctgttgtttttaataaagccatctgcctaacctccatacactgaataagtctattttagcacaagcacgtaaacgctgcctaccccttagcggcttgctttgctaaattgcgtttcacaatcttcgtgagcgcttcggcaaaagcagcgacgtcttcgctcgatgtttcgtgaccaaaactaatccggatgctttcggcaacgcgcgggctatcctcaccatacatcgcgatcaacacgtgtgagggttccaaatcgccagcagtacatgccgaaccacctgaaattgcaaagcctgctaaatcaagattcatctgcaagacataggttgaaacacctttaatccagaggttcacaacatgcccgacttgatcagctccttctgcgttcagcgcaaaatcaatgtcgttggcttttaaatcagctagtaattgctgtttgaatccagcataccgtgcttgtaggtctgctttaaccgctggggccaataattcaactgctttcgcaaaaccagctacagcgggcacattttcagtccctgcgcggcgcttcttttcttgttcgccacctaggacaaatgatggtaaatgaatcgcgtcgttgacatagaggaagccgatttgcttaggtccattgatcttgtgggctgaaactgccagtaaatcgatattgtcagcttgcacatcgatatctaataagccatacgtttgcgtagcatctgtgtggaaccaggcgtttgagtcgcggacaagttcaccaatttcgtgaattggcatatgactgccgacttcgttattgcccatcataatcgatactagaatcgtttcgggcgttaaagccgccttcaaatctgcgagatcaatcaccccttgttcgttgacgggtaagtaaatcacatcaaacccttgcatttctaaataggccatcggttttaaaacggaatgatgttcaattgccgttgtaataatccgcttgccttctttagcacgcagtttggctgtctgaaggattgccgtgttattactttcggttgccccactcgttaagataagctcgttatctttcgcatgaatgctctgtgccaaagtatggcggctggtatccaacaccgtgtgggcttggcgcccaaaataatgggtgctcgatgcattcccgaaatcggcctgcatctgttcggtcatcgtcgcaatgacttctggggccatgggtgtcgttgccgcgttatctaaataaatatgtttcacaatttttcgcctcattttaaaaagtatctataatagtttaacatagttcgcttttaaagcacggataaacacttttcgctaccaaaaaaggctgggacaaagataccttgtcccagcctttaaaacacttaatctcagattaagcagtcattaaagctgctttttgatctgctgttaatgattcattcatccggccactcttgaaaccagctaaatcaaccgttacaaattcaaaaccagcttgttgtaatgcttggttgatttgttcgctgtgggttaagaagtcagcaatttgtgcttctgggacttcaacccgggcgattgattcgtggtaacgaacacgaaccgttgcaaaacctaaatcacgcaagaatttttcagattgcatcacttgagcaattttggcttcagttaaggctgtgttatatggaaagcgtgaagaaactgaacagctcgctactttattccagttatttaagtttaatgtctttgctaattgacggacatcaatcttataaaaaccagctgtttgaaggacactttctgcgccagcttcgtcacgggcccgtaaacctggacggaagtcgctgttatcatccatgatcatcccatctaaaacgtggtcaaagcctttttcagcagcaatttggttcaattgtgtatagaacatcttcttgctgtaataccatgtttctggtgtgttgttggcaatgtgttcgtcagataagtagttcaatgttgttgtttcgacattcgcgcccatatcatgtgccaagtcgatggctttgttaaattcttcgtctgtgaataattctgagttagcaacgactgctaagacgttttctttgccgagtgtttctaaagccatttttaaaactaatgtgctatcaatcccaccagaaaaggcaacaatcactttttccatttgttgtaaactgacagttaacattgcttttttttcagataatgtattcattgttaaagacttctttctatatcattagattaattgttttaaagctgttaattcattttgaatccgatcggcatacaccaaatcgttgttatctaaactcttgacgatcatcaagtttaaatgcgcggcactatcaacaaagtttttgaaagttgattgactagcggtttgttgcgcgtcatcaaggctaccataaagttgttctgctgttaaaagcgcttgttgcgcttcaattaaactggttgagattgtccccggttgtgaggcatgagcagcgacttcgaataagtcgaccatcatgttttgcgtttgtttaatttgttcacgcatggttgattcctccgattaaattagatgccaaagaaactccgcataaagagtgcggcacatagaccaccaacaaatggtgcaattccgggcacgataatcccgtattgccaatctgagttggctttatttttaattggtaaaagcgcgtgagcaattctaggacccatatcacgcgcaaggttcattgcgaatccggtaggaccgcccatccccatcccaattgcccaaacaagtaacccaactgcgattggtgcaatcccaggtgtcttgatttgtgtaatggcgataattgatgaaatgaaaacaaatgttgcgaaaaattcaacgaagaagttccgtggtaaattccggataccaggtgctgttgagaagatgttacgaaccgcaacaggatcgacattgccttctgatgctttaaattcatcagcgtacatgatatagacgataactgcaccgacaaccccgcccaagacttcagcaactgagtaagggataaacattgcccatgaaacgttgcctaagatacattgtgctaacaccatggctgggttaattgaaacatctccgaagatgaataatgaaactgtaatcccaaacccccatgttgtaatggcaaataaatgacctgagccacgatactttgaacctttgaggacttcatcactgtgaaccccaaccccgaaaatgatcatgagcgctgtgcccatgaattctgctaataactgatgaatcatgaataaattcctccaaataataacgatttaatatctaaattttgatagctttaacgcgttacatcaggatagacccgactcgggcatactctgataaacagcaagataaacttgattaagtgccacgtcatgcgccttggcggcagctagacaatcgtcgaactctggactatatttttcgagatcgtcatagttcacgattttgacccgaatatcgccgaagcgcgtggctacagtgataaaatgacgtggcataatggtgcgccccatcgtctggtaacgcacaccaacagttgctgtgtgttttaagatcagataagtcatggcttgttgatcggctggatgaatcatgaccgttagcttaattgcgggccgatttttcttcatttgaattggactgaaaaaggcatcgagcgccccattgtccatcaataaatccaaaaccggcgctaaactttctgctgactggtcatcaatgttggcctccaacactaaaatctgatcggtatcggttttaacaacctgttggcttagttttttttttcgcacaacatcacgcgtaatgcattgagttgcggtgtttcccgattaccaaaaccatagccgactttaatgatcgtttgatcgtctgggattggacagaattggtcgacaatcgttttgacaatccccatcccagttggcgtgatcaattcggtctgcaagtctgggttttgtttaattggaatcgcactaccgacgcgcatttgcatcacagcggggactggtacgggcatcatgccatgcgcgactttgataaagccactcccatccgttaattcggatgaatagacttgattaactgccaataattcgagggcgacaaacgctccaacaatatcgacgattgaatcaagcgccccaacttcatgaaaatgaacatcacttaatggtaggtcatgaacgaccgcttctgattgcgcaatttctgtaaaaacttgtttggcgttcgttttaacataatcgcttaaatcactgtgatcgatgatggcttcaatgtcttttaaatgtcggacgtcatcaccatggctgtgcgtgtgtccatttgcgtgttgatgcgtgtgtgcatggccagttgcgtgtgtatgcggatgttgatgctgtgccggtgttgtttcaataaaaccttcatccttgtgcatggcttctggcaaatggacgtcaaaatcggtgccataaatactacttttagcaatccgttctgcatgtaggtggtagccagggacattcaacttagctaattctgtttcaaactgtttgaaatcaacccctaaatcgagcaaagcgccgatgaacatgtccccactaattcctgaaaatgcgtctaaataaagagttctcatttgtcatcctccgtgtcacttaaatgattgatcatacttgctgagtagcccgcaccaaagccgttatcgacattgacgacggtaatcccggacgcacaactattgagcatggtcatcagcgctgttagtccgccaaagttagtgccatagccaatactggttggcacggcaatcaaaggtttttcgatcaacccaccaaccacactggctaaggccccttccataccggcgaccacgatgacaacttgggcttggcgaatttcatccaaatgttcaaacaagcgatgaatgcccgccacaccaacatcatagattcgtttaacttgattaccgtatacttctgcagtgaccgccgcttcttcggccactgccatgtcggaagtccccgctgtgacaacggcgatatagtgatccgtggttggtagtgggtcaaccatcagtactacacattgcgccatttcatagtacattgctgtcggttccgcttcttgaatcgcagcgtacttttctggggaaactcgcgtacataaaatattttcggcatgtcgttttaacgaaccaatgatgccaatgatttggtccgccgttttaccggcgccataaatcacttccggatagccattgcgcttttgccgacttaaatcaaccttggcaaagcctaaatcatcaatggtctgcgcatgtgccagttgctttgttgcttctgtcacactgactttttggtttgcaacagcttctaaaagctgttgtagctcatttgttgtgtccaaactactcattctttctattgttatttcacaataacccctaaaccatcagggatcactgtcactttggcatctgccccttcaatctcgtaggcccgttctaacgctgcatctaaactggttgccaattccatatgcatgtctgtaattaattgtggatcaaccaaatctgacacgaaaatcacatgatgttggaccagaatccgagccaagatttgtgatgtccattgatcagggaccgtttcaagccgtggtgtattgattgcttggtctaagaattctttaggatccttaacgtcagcaatattgtgatagaacccatcaccaccatgcccgtcacgtgcaccagcgaccatgataatcacgccaccttgtttgttcgtcgcttcagcagcagtcatccctttaacggcttggtaaatattttgatcaagtggatagccaccatttgttgaaatggcgatatcacaatcgatcttgtcgacttctgataaactttcaacgaagtcacagccttttttgtgcgctgtttctaaattaccggcgaatgaaccgatgatgtgcttgtcttcatctaaaacaacgttcaagatgaattcaagcccagcttgtttagcggcataaaccatatctttgtggactgggttatgcattaaattcccggttcttgaatagtgggaattgatgaattcacctgagtggttggccataattgttttgtatgaagccacacccggtaaaacagacttccgcccgcctgagaaaccagcgaagaaatgggattcaatgaagccttcagaaatcaataagtcagcttcaacagcgactttattgataatgcaatcgccacctgatggcaattgaccgattttcacaactgagctgtcatcggttgaaacatgcatgacgatttcttcatttgcaacgatttcttcaccatatttgttaaccaattcttcgtgcgttgatggtcgatggaacccagtcgcaactaaaatccgaatccgtgcatctggtgctacagaacgaatccgtcttagtaaaatcggcgtgatgatatgtgaaggaactggtcgtgtatgatcagaactgataatcacgatattctttttccctttagccaactcttctaacttagggctatcaatgggattgtccaatgatttttcaaccgtttcggcttcgctcattggattttgatacgtagcagcttgtgaaacaagcttcccggcaaaattcgcgtctgcaatattagccgtgataattttttgatcgtaaggtaatttaatggctaccaaactataggacttcctttctcaatgctgattgaatgcttttttaaagctacgtccatagttatacagattttctgaaaaggatgcggtataatttatgaacaacatttcattattacttttaggtgtaacaaatgataacaaccttatagtcttcaagacgtataatttagattaaagttatttaatgattagcagatataataaatcagcacaaagggtaggcagatgcattatggttttaacagacattgaatttttaattaactttttagaggaacgtcacgtcccagtgattaccaaaaagaagcacacatacttgacgtaccacggtttggaagaacggtatacttatattctgaaaaaaggcgtgattaaaaactcgatcattttacaagacggtcgtgaattcaatctctcttacattacccagccggatgtcatttcacttttacgggatgaaatttcaaaatatacggatcaaccgtttaacgttcgcgttgaaacagaggaagcaactttctatcagattgaccgcgtgaccttctggaactacgtgaatgccacccccgagttacagaattacgttaaaaattactaccgcaaaaaattatccgagaatatttatcgcttgcaaaaaatggtaatgaacggtaaaaacggcgggctgtgtgccttcttatacagcttaattgatctctttggtaagaaacgccgcgatggcatcctgattgacttcgtcgttacaaacgaagacattgccggcttctgcggaattagctcgcgcagtagtgtcaatcgcatgctcaaccaactcaaaaaagacggcgtgattgaaaccaccgagcataaattcttaatcaaagatgtcagttacttgcttgataatatcgccaattagcgatttgttaacatatgtaaacatgattcgtgattgaaaacggctatgagacgcgtagccttaatagtcgagaacaaatcagtggaggtttttatgtatgcatattccagataattatttaagtccccaaacgtgtgccgtgcttgcagcggccgctattccagtcattggcttggcactcaagaaagttaaataccaagtcaccgaaaaaaaagaaacggtccccatgttagggatttccgcttcactatcgtttctgatgatgatgtttaacgtgccaattcctggcggtacaaccgcccatgctgttggtgcaaccctattagcgattctcattgggccgtacgccgctagtctagcggtaacgattgcactcatcatgcaggcctttttatttggtgatggtgggattcttgcactcggggccaatattttcaacatggccattatcatgccatttgtcggctatggtctctatcgactattccaaaaagcacaccagcccaaagtgggagtcgtagttggcgcatatctcgggattaatgccgccgcattaatggccggtattgaacttggtctgcaaccgctcgttgcgcataacgcagctggccaacccatgtatgccccttatccgttacacattgcaattccagccatgttgttcgctcatttattagtcgctggttgggttgaagccggctttaccctcgccgtttatcaattcatttgccgggttgcacctaacgaactgttcgttgcaccacgtcaaacagttgatccacaaaccagccgtcgtttacatcgcgcgctttacagtttcatcggcctattgattatcttatcgccgattggcctattagctagtggtactgcttggggcgaatggagcgcaagcgaactcgttacacaactcaaacatgatcacctaggtcacagtctaccaagtggtatggcccatggcttaaactttaatgccctctttagtgactacacagttgctggcgttccattatcacttggctacatcttatcagcggtaacagccgtcattgttttttatcttatcggaaaactggtgatgaatcattattcaacccaatcctaaattaccaacttggcttcaaacaacggaagctacgcccaaaacggtcgcgcaattcgaccgttttttaattcaaaatttgtgctttagtgatcgtttgctgcggcgctttaatcaaacaaagcctcaacctttaaccgcccatcaaacgcctggtattcaactgattagtttattggtgacactcatcattctcgtgttaacccatagtctacttttaatttggttgattggtttattgacgttaattcgaatttgccgcttaccaagccagcatttatggccgctttttaaacgcgtcggtgatatcagtatcattgcgattttattaattctaccgaatttttggctcggccaagtcgccacaacgcttttatttatcgtacggactgaaatcatgttattaaatattgctttctttctcgagacgatcacttggcccgcttttattgttgctttacgtcaattaagactccccagtctgctcattttgacactcgaaattagtctgaaatacagccacttgctcgcccaatttttacaagaatccctctgggcaattcggctacgctcaactggtaaaagccaccaacgacaaaatttagtcggttcactgattggccgcctctacttaagttcccgcaactacattaccgctttatacgatgcgatgattctccggggctacaccggacaagtcacccgacggacgccgctaacagtgaatcgctacgactggcgcttaatcagctgggatctagggctattttgcctattctgtttcattcggaggtaatcagatgctgaatttgcaacacattcactacgcctatacgcaaaccgacagccttaacgatatttctcttaccatcgatgcaggcgaggccgtcgcgtttatggggcctaatggttccggaaaatcgacgctgtttaaattaattaacggtttgattcagcccagcgcaggacaatattattttaaagaccaacttgtcgatgcccgcttcctcaaaaagcctgcacaggcgactgccctccaccgcgcaatcggctttgtgttccaaaatagtgacgttcaattatttaacgaaacggtgcgcgccgaactcgcttttggtccagaacagatgggcttagccccagatgaagtgcaaacccgcgttgacgattgcctcgcgttgttacaaatcgaacacttagctgatcgcgtcccttatcaactttccggtggcgaaaaaaaactcgtcgctttgggcagtgtgctaacgatgaatcctgaaataattgtgctcgatgaaccattcaacggcctatcagccgcctaccaaacgctgattatccacttgctccaacaactcaatcaagccggcaaagggattttaattgcaagccacaacctggctcaagtcaaacaagtcgctaaacgggtggtcgtctttaatgaagaccatcaagtgacccatgacttaccactcgcaaaacttgaacaagaaccggaactgcaacgaactttagcattactctaaagagagtgtgttgtagttactgttaatcgcaggcatataactgatagcacaaatatgcggatatcaaaagcggcggatggcacaaaaataatttttgtgtcatccgccgcttttgcattttatattaatcgccttcgatttgtaaccatccctctgtcgcattgaccgtgattgactgtccaatcggtaacgttaaaatcggctgggtatgaccaacattaacgttgtacaaaacggggattgtcttcaaaatcggaaacttattcaaaatagcgattaaatctgtctcactcagcgcgacatcggttggaatacgaccgataatcaaggccttcggatgttccatactctgtaataatgccgccaaattgcgtgaaaaatcaaacggatctgacccatctgagcactcaatcaataacacttgatcattataatccggttgataggctgtcccttgtaatgtataaagtgtatttaaattaccgcccactaacgtcccagttacacagccagacgtataactctaccaacgattaggctggtaatcccgcgctgcattcggtaagtaccacgcatcactcgaccactctttggaagccgccaaccgaattggtccagcttcctgcgtcatgactttttgccaattatgcgcttgataatcgcccaactgatctaccaatttaaacgaaatataggatggtccataatacgttatcaagcctgtcttagctgtcatcgcatttgccagcgcgctaaaatcggaataaccgcagattattttaggatggcttgcaatcaaatcaaaatcgatatagggaagtagctcattgctgttataaccaccagtcaccgctaaaatcgctttgacattgtcatctatgaaagcagcgtgcaaatcggcaatccgcgcttcaattggactagaattgaattggtccattaccaagacatgctgcccaaacgtcacctgataaccaagtgcactcaatcgatcattcgccggttgattagccacatatccgccaacactttgcaaactattactaggcgcgatgacccgaatctcatcaccttctgacaatcgtgtaggaatcatcttaattcacgcctctccgttaccacttcaaaacgctcacataaacaggcaattgtcggcgtaaacacctgccctgcctctgcatattcagctttaaaaaaaggctcgtgaactgaacgccaataagcaagggttcgatcaccctcgccctctaaaaaggcatgttcagcgtcgacttgattatacttaacaatcgtgcacattatcgttttcgtaattgcaaccggccggtctcgtccatctaaaataacattataatcccccacttgtgggacatgctcatcgggttcatacaactcaatcgcagaagtggtggccgttttttgaccgattattaccaatcgtgccaattcattggccatttgttctgtattcccaaatgaataaatctccgctggttgtaaatcaggtggtaactgctgttgttctataaaatgttgccaatactggctcacttctggtgtcattgacatcccctcttccattcgtaacgttgttgttagtttagcagaatttaaccatttaaccaaaaaaagaaacttacccattaggataagtttcttttgatactttatgcccaccgacgcatctttttaagcatcatcggatagcttttaattaggaaccattgtttcatcttaccggttgtttggtcggcacgaatcccagcaatccctttttcaagcatctgttcaaaagtgattgttggttctgtccactgaccatcaacgtaacacagttggcaatactgatttgacttggtgccatcttgttcactaccttggttttgtgcagtcagtggcatgccacaactttgacagaatttttccatgggtggactcctttaacgtgcttttcaaaccatgttcctacgtttagtctaattagccaaacaatcggcttcgccgcttattcgtctaattttgctaatcctcagaacataaccagtttgaacacacttattttcttaacgtgctttcatcaacagtttcctgcgctttgctacacttatcaaatcatcgactatgtcgctaattcgttaagttatgcaaatgctcagaagctaaccgttgatgacgcacttcttttatttaatattcttcaagaagttaagcaacatcgctgctgatttttggcctgcttctacgatgaattcgtcaaacgttacgccggcttcttcgtcgccgacgtcgctcatcgcgcgaatgacaacgaatggaatcttgaattgcgttgcaacttgtccaattgcagcaccttccatttcacaagagagcgcttcggggtaaatttctttgattgccttgattttatcttggctcgcaacaaattgatcaccggtgacaattaaaccaacacgtggttgtatgtcaaccgctttagccgccgcttcgatttgttgaacgatcttagcatcactttcaaatcgttggggttgttgtggtaattgacctggtaagtaaccaaaggcagttgcttctgcatcgtgataagcgacttcgcttgaaatcacgacgtcgccgatatgaaggccttcaccaatcccaccagctgaaccggtattaatcacaacatctggtttttcttcggctaataaaatcgccgtcgtcatcccagcttgcactttaccaattcctgattcaaccaacgtcacttcatgaccgtacaattgacctttataaaaggtattgccagcaaccgtgtgttgttgcacatcttctaattttgttaaaagcgtccgaatttcttcttccatggcgcaaatgacactaattttcatactaattctctccattctaaaaaaacattaactttaccattctataggaaaaaaagaatcaagtaaacgataataattaagccaaaggtaatcccaatcgcccaattcaaccgtttcttcattcgtttaaccgctggtggatcgactttcttagtccgacgcgttgctgtttctggttcgccttcagtcaccgctttaagggcttctttttgttgttcacgtgcatattcacgttctgtcctgaggcgctcttgatcgcgctgtttaaaggcggcttcttcagcctctttttgttgtcgatattcttcgcgcgtcttaggttcattcgtcatttctaccgctcctattttgcttgtaattgccagtaatacaacgccataatcgttttggcatcacagattaaaccatctgcaacggctgcttgtgcttcttctaacgtcaacttttcgacgttcaagaactcatcgtcatctagcgagcgcttatgcgtgaccggcgttagtgtatcagtgtagtataaagtcattaattcatttgaaaaaccgggtgatgaaaagaaatccgtcacgtgcacgagcttttgcgtcgtcaaacccgtttcttcattcaattcacgtagtgcgacctgatctaagttcttttcacctggatcaatctttccagcaggaatttctaacgtttcacgttgcatgggggcgcgccattgtcgcactaaaaggatgctgttatccgccgtaatcggaataatgccaaccgccccatgatgatagacaatctcgcgacttgcggtttgtccatttggcagtgccacttgttgaacggcaagatcaatgatctggcctttgaataatgtttcttccgagaggaccttttctgtataatccatctgctaatgccacctttaccgtttaatcgctattatacgcgcatttaaaatcgtccgccatcgtcaatgctaaattcaggttcacggccgaattaaaaatccatccttaggcggatactcttttaccttaattcctgttagaatgaaggcatcaattaaatcaggagctgacaattatgtttaaaaaaataacgatttggtgcacaggcatgctcattacacttgtctcaatcccaattttggcaacatgctttgatatttatggtgattgggataatttcatctggttcagccttggtttattattagggctgatctacgttacaatcagcctcaaacggcttaaacgacaaccagaatataaaaaagatcagcatatttcaccacaaatgctgaaacactaccaagatgctggcatgagtgatgacgaaattgactttttcagacaaacgatgcaacaagccgaagcgcaaattaaggtacttgcaaccaacatgcaagctcttcctaaattacgggcaatcgatttaaatcacgatacaaccaaggtcagccaatcgctttttcgtgcgattgtgaaagatccaaagcggcttcacaatgctggcgactttttataccggcacttaccatcaatcaatgaactgactagcaaatacatcgaaattaaccatcatgaagtcaagacagccgatacctatctcgttttagataaatcggctgcggcaattgatgcgcttagtcaacagattcaacaagactacgcggatttcgtggccgaagacgtcgatgacttagacacagaagtctccgtcgctcaacaacaaatcaccccagatcacaaggaggaagactaatgtctgaaacgcccaatccaacaaacgatttaatgaatgatttattaaaagatcctttcgaccaaagtgcgccagttgtcactgaggaagcagccccccaggcagaggcctcaattatcaataagctctcccctgaacaacaagcacaggccgaacaattggcacaacaactggacgtcaacgaccaacaagccgtcttgaattacggcgctcaagcccaaaagaaactcggcgctttctcccaaacaatgctcaaccaagtccaaagccaagaaacaggcgaaattggtgacgcattaacgtcattgatgtaccgtttaaacgaagccaatcctgacgaattacgcgccgaagacagcaacgttttcaagcggatgtttggcaagattaagaagtcggtctatgaaatcactgcgaaatatcaaaaaattggcgcccaaattgatgggattgccgttaaattggacaaagaaaaaaatgcattaatgcgcgacaatgagacgcttgaaacgttgtatgcgaagaataaagcctacttcgatgcactcaatatttatattgctgctggtcagttgaagattcaagaattagaaacaacgacgattccagaagccatggaacgcgccaaaaatgacgataatcaaatggtcgtgcaagaagttaatgatctcaatcaattcaagaaccgcttggaaaaacgaacttatgatttagaattagcacggcaaatcacgttgcaacaagcaccacagattcgcttgattcaaaataccaaccaagcattagctgaaaagattcaggcttccattaacacggcgattccactctggaaaaaccaagttgccatcgccctcaccctgctccgtcaaaaagatgcggtcactgcacaacgacaagtgtctgaaacgaccaatgacctcttgaagaaaaatagtgcgatgttgaagatgtcttcaatcgaaaccgccaaagaaaatgaacgcggcgtcgttgatatcgaaaccttacagaaaacacaaaatgatcttgttgaaaccttacaagaaaccctcaagattcaacaagaaggccgcgaaaaacgccaagtggctgaaaaagaactcaaccacatggaaaatgatctgcgcgaacacttattggcctatacccaaggtcaaactgctgctaacagcggaccaaaagaagttaattaaaaattagtaattaatcctaccataaattgtgcaaatagtaactattgcgttgtttaaaatcaaagattgctttttacgtcagaaatgctagaatatttaagtgacgtttggttgtaaaacaccatatgttgtatatcaataataatttaaacacattttatggtcaaaagagggagactgatgacattgctcgtacttgctggcacaattggtgcaggaaaaactagtttaactaaatatctatctgatcacttaggcactgaagccttttacgaatcagtagacgataatgaagtattaccattattctacaaagatccaactaaatatgcattcttactacaaatctatttcttaaacaaacgatttgatagtatcaaacaagcatatacagatgataacaacatcttagaccgttcaattttcgaagattcattactcttccacttgaacgctgatcttggtcgcgctaccgcaaccgaagtccgtgtctacgacgaattattagctaacatgatgcaagaattgccatttgctgcccacaagaaacgccctgacttattaatccatgtacgcgttagtttcgaaacaatgctttcacggattcaaaaacgtggtcgttcatacgaacaactagaagccgatccaaccctctacgactattataaagaattaaacagccgttatgatgcttggtatgaagcctatgacgaaagtcccaagatgcaaatcgatggtgacaaattagacttcgttgaaaacgaagctgatcgtcaaaaagtcatcgaaatgattgacgaacgggtgaaagccttaaacgcagaacaagaagcaaatatgggtgcctaattgcacaaaaaaagccgttcgacaaattgtcgaacggcttttttattatgcttgggtacctttttgcatccataattcatgaataatgccatacagccgggcatagtgatcgctactagcatttaagcgccacgtaaaatacaacgcctccggattaacgttttcgggtaaggcaatgctcgacgtccgaacaatcaggtctgcatcccgtaaagcttcatcggtcgtactaacagcgacatatttgatattatcgagtgctgttaagatatccatatagccaatgtaatcttgctcaatcacgagtgcgaccttcacctggcttacaggatgatactgctggatgacttgttgaattaaattatagtaagcctttatcaaattctcccgcccacttgctaaaaaactaaaagctggttcgaataagaggtaatctacggtatcactaatttttttatggagtagttcattgggttttagctgcggcatacgaatgactaattcattaaaaacgacagaggtcgcgtccatcccaaggatataggtcgtcaccgtagtcgttaacaacgcatttttgaaaatatcatatgtgtgctgcgaaatctctaactcatgcataatatcaaatggaatacgctccaaaaaggcagtcacaaaacgatgaatttctggtatataacgttcatctgcccaatcagcagtcaccttagtacttgttattgagcgtaacggtactggacaataccgtaacaagaagaatagtccagcggcttctgaacgcccttccgttaacgttaactctgccaaacaagttcgtaatcccgttgattctttagtgaaatcggctgcaagtaaatcactgattaaattaggatagggataccgaatagttgctaatttttcatcgggctgcacgactgcaccggccatcactcgataataagttactgccagaatcgtggcgccaatttcgtgcgttaataggttaggcttttgcaattgaaattcatcacagacatagtcaaaggccgacaaaacacattcgtgattgatttcttcaaatagccattgatgcccaccagacgccaaccagtataaggcggataagaccaatcgaattgtcttctcatcaccttccaaccggattggttcgtatgaaacccgtaagttgaaggcgcgggttagatcgcggacttgcttcaaatgacgtaatacagttgctttactactatcatgctctgctaagaaggttttaaacgatatatccccgccccgcaatagaatctgtacgaaatcatagatgtcagaatgttgtactaaatataaatgatagacatcacttggaattgcgaagagtcgcttaacatcatcttcctccgtccctaatattgcctgcagatccccaacaatactgacatacgtattgtataagctactataattacggtctaacaatgttgccacttgcttcaaattgacgtcatcgattagtgcttcgccctttttagccatgctcattcgttttctaatgggtaattcatcccatttgacattaataatatctaagaaaagagcatacttatctttttctgccgatgttaaataaacactatcggtatccacattgcttaaccccttgttccaaataattgatatatattttaccatcaatcgatattaaagcataaccattctacagcgagatttgttgcgtataacaaaaggcgatgcgttattaacacacaccgcctcaaaagctgaaaataatttcatcatcagctctaattaaacctgacacgctaataacttaaatcaccaattgccatttcaaatcagcattatatgagccaatctgataagcatcattataaggtagtgataactgtaactgactttgtttccaaccaactgtggttccataactcgttaaatcttgctcactgattggccgctgtagaatcccatcaatccattgattatcgggtgactcattagttaatgcttttgcatcactatcatttaagcggtatttaaaattttcttgcatataaaagggattattgggtcgttgatttatccccagatagcctagttgtaaatcaaaatgactacacaacggattacatatgactactttcggcgcttttggtgtaccagtatctgccacttttagttgtacacttggtacctcatttagcgcaatcgtccgattagtaccccccctacttcgacccaaaatttcgtcatcaaacgtaattgttttcgggatgccaacctctactgccccgtttaaagttaatttgaattggaatttagcgattggatttaaatcatcatttgcaataggtgcacttgccgccttttcagacaacgtaaactcaatgtcgcttgtccgcatgacatcacaatgcagcccttgctccgtagtagtcggattccctgtctgattctgactagcattaattagctgtgccataaagctctccgataaatgcaactgcgaatcggttatcaccggttgccacactacattttgatctgcattaacacgatagtataacccaaaagaatcaggcgggttaactaggtcgacttgtcctgtaatcccgtactgcggggccgcatgcagtgtgccatccgcataattaaactgcgcatggccattcgattttacagactgtgcatttttggcacccggatcagctaatgtgacagagcgaatctcaggcacctgaatgcctggaaaatcgtggccctgaccaaaaacggctttatcatgattgggtgaaatcggagcatcgggtatgtagattagttcacgaataatactttcaagtcgcgattaaattcagtatactaaatttagataaacaaacttactggaggatagtattcatgcggacttggcaaaaatggactttgattgttctggcacccttcttaataccaattatgtattttgagaaccaatattttatgagagagcagtttaaacagtcgcaaaagaatatgcagcagtcaactttaagtgattttaatgaccaagcaagcggtcaatacgcggcctttaaaatctacgctgtagccaaaccgcatggaaaaatctattattttgtcccacaaaaccaaaatggggccaatatcgatttacaaaaacaagaagtcgcactcggtaatcagctttatgcaaaagcacacaaagaatcacccgacattgaccatatcacgttgtacgtcagttatactgctaagaacttgcaagacaatacgtatgcttttaagccaaccgccgaggcttatggttttgtaaaatcacggtttaagacccgttatcaacgcttattttcacaaactggaactgaagccatctatgatatgcagcacaatacaacatcggtttcgtttaaagatttacaaaaagatagcacaacaattccgatgattcgtcaacttgcaattaaccaacaattacaagcccatgattatacccccgaacaacttacacaattggaagcacttgatttcccgggaaatgatcaagcaaccaattttgactttacaacagatggtctaacattgaaattcgcaaagaatcctcttgatattgaaacaattgccctgccaatggcaacggttggtccatacctcaatcccaatcttgtcccagaagacaatcaaatgccttccaaaaaaggtggtgctaaaaagattgcactcacctttaatacgacattaaaacctagcactattacgagtgtcattaatcaactaaacgatttaaacatcaaagcaacttttttcactactggtaaagcagctaaagaacatccggatcaactgaagcaattactcaaagctggccatgtcgttggcacccaagcgtataacaacgatgatgacttggatacaatgagcgcgtcagaaattgccgataacctcaagcaaaccgatgccgcctacttcaaagccagtggtcaattgccacacttattacgggtcacaaccgaaacccctagtacggaattaacaaccgctgctagccgggcactaatcgcttggagtgttgattcggaagattggcgcttagatattgatgcgccgacaattgtcaaaaatgtaaatgagcgtattacaggtggtgatcttgtcctactgcacacaagtgaggcaacgattaaggcattacccgcaattgctaaagaacaaaccgctcaaaaacgacatttcgtgacagtcaacgagctcttcaagcaacgattaacaccttatcaacaatatttcaaagctggtgatcaacgctcgctacaataacgcaaaaaggcccgacaacttaaattgtcgggcctttttgtaatctaaacgtgctccgtaagccgcacgctatttatgttttgataaatcaacttcttctagtggaatcatcttagttttgtaccgtactttatagtaaacatatagtacgacaaacaatggaatgctcatataactaatcccaatcgctgtccaatcgaagttcttaaaggcttgaatatcttgccctgcaatcaccaataaacaaagcacgaatgcaaaaatgggaccaaatgggaaccaacgtgcatgatatttcaattcgctcaactgatgaccttgtgccttgaacgcacgacggaaacgataatgtgacacagcaattcctaaccaagcaataaacccagtcaacccactagctgccactaagaataaataaatccgagttccaaaaatacttgtcacaaaggttaaagctcctatgattgttgtaccaatcagtgccattactgggacgccacgtttgcttgtcttagcgaaaattttagctgcatagccatcttcagccattgaccacaacatccgggatgaagcgtacatccctgagtttgccgctgataacactgatgttaagatcactgcgttcatgatgctggctgcagaagctaacccagcccgtttgaacactaacgtaaatggactaacagcaatattcgtttcactcgcgcccaacaatgagtggctatcataaggaattaaacaagcaatcacgaagattgaaagaatataaaatagcagaatgcgccagaaaacttgtttaatggcctttggaatactcttttctggggtctttgattcaccagctgtaatcccaattagttcggtgccttggaatgagaagccagcaatgacgaagacactcaacatcattggtaacccaccaacaaatggggccttcttataagtgaagttactcaagccagtatgatggccacccataatcccgagaatcgttagtaacccaacacctaagaaaataatgaccgtaatcactttgattaacgcaaaccaatattccgtttcgccgaatgatttaacactcgtgatgttaatcaagaaaattaataatagtgcgactaagctaaaaatccaccctggcatatcaggaagccagaattccgtaacgagtgccgcggtactaatatcaaccgccaacgtaatcgcccagttaaaccaataattccaccctaacgcaaaaccaagggctggatcaacaaaccgcgttgcataggttgagaaagaacctgagacaggcaagtacgttgccatttcacccaaactggtcatcaagaagaagaccataatcccaatcccacaataggctaacaatgcaccacctggacctgcctttgcaattgctgaaccacttgtcacaaataagcccgtcccgatactaccgcccaacgcaatcatcgaaagatgccgcgtctttaactcccgcttcatttcatttcctgccataatacttcgctcttttctctatgatttcaagaaaaagccccaaccacgttctagcaaacaaaaaaacagtctttttgtctgctaaaaacgacaaaaagactgatagccttataatatccgttgatagcgccccgtaacatttcgttacgacagtccttgatttattcaaccaagtcccaacatcaaaatgaataagcaaattgacatttcggcaaattcccctttaattatccctcattactgcttagtcagttcaggataacgactcatggtttttgcgacctcttatcttgttagaaatgagtatacagaattcacacaaccacgtcaattatttccattaaaaaaccacgattatttcaatcgtggttttcattttgcttattgttctttatctttgcgtgatttccgccataaaagaattatcaatagtaggataatgacaatcataataccgataatgacatataaccaccagttattgttctctggtaattcaacggccttatcgttatattttgcaacttcctgacgggtaatctcgcttagtattggttcctgtataatcaatcaatccattttcattggttgtcgctgtcgtaggggtcacatcgaccgtaattggtttcgttccactattttgaacccgcacaccaacttcttgttttcgaccaggagtaacttttaaatcataatagcccaactccgtatccgtttgattatcaggatagacgggcgtaaccgaataagtcactttctccgcctgaactggttgatgactaaccatcaacatcaggccaaaagtggcaaccaccgctaataacaatccaaatcgttgcttcattcgtctcattctattcgctactccttctaattcagagtacgttttatgtaataaaataataagttttcagcaaatatatatttttaattttggtgttaattattttcttcactattaatcttaatcctttgttaacaagtggtacggcgttaattggatatgccattgtccattttttaaataaattatcaattttctgaaactatcaactaatcaattgaaaactaattttcaattccagcacaaaaaaagcaatccaacaaccggattgctttcactctattttaaatttttaatgatcttctggatgagtaattcacgctgttcggctgattgattccaatcaatcactggaatggcttgatgcccaattgtctcaataatcaagccagaaacagtttgccgttttaactcgttcgcccatagcatgtccgccttgtggaacgcagcgttaataatcaatgttccttgtttagcaacgggttggaagtcattgaagaccgtatccaacttacccgtatctggataagacttaatttgtccttccgtggccaacacaacatcgtagattgaaacttcatcggctggccgcgctagtgtaaaaccaccactattaccagaagccgatttcactagcccagccactactaacttacgaataattttgcgtaggtaagtctgtgacccgcctaagcgatgatgaatgacttcagacgaaattgtgtgttcaggatcttgcgtcgccaaaagtacgataatacaagttgcttgttcaaacgcccgtgttaaatgcattagccctatcccctttttaacagtcgcgcactacgcctttcgcgtcttagtgaatgaaccagaggattgacctgcgtcggtttgtacctcaaacccatatttttcaagaatgtgtgcaactttcttaaaatcatctctatcgaacgtactgatattaccatcaattgtttcaatttccaacttattcgctaaattacagaaggctttcactgccaattgtgctaaaccaagattttggaaatcataaacagctaagcgtgaagctgctcctaatgtttcaagaactgtaatgtgcatttcttttttccatttattggtttcaaataagagttgtgcttgaaaatcaaccgttgaatgtccaaagcggtcgacgttagcgtatggtgtgtagacaaaaatcgaacttgtcgattcttgttgaccattttcgcgatagtctgtatagacgatgtactgcttaaccttttcatcattaacctgattcatacttgatagaatcgtcaaattttcgtttgcctcaatttgcgctaacttccgtgcataggcttggtcgttttcgtttgccatttgattaacccccatttgtctttcaaaccgattataccatagctttctcatttaaaccgtgatttattacggttataaccatgttatttttacaatttgaaaacgttcactattcggcggtagtactgaactcgttgcccgcctaaataatccggtagttgtgattgataagtcttctcgaactgaactttctgtaaactcgcttgcgatgcttggttggttaaaaagcaggccgcattaaaggtgtttacaccagtttcttgcgcataggcttgcatcgttgccggcaatactgcgctgataatcccacgtcgttgatatgccggtaagatggcaaaactgagttcatatgccgcgactgattgtccatccgcactaagggtaggggcgagcattatcaatccttgcaccacctgcgttgtgcgatcaacaatcgcccaagcatcctcatcattcatcaacattgttagaaacgactgtgcttcttgttgagattgaaaagccgtcatatttagctgcgtcacaatctttttttgacaaccaatttgatagaccacttcaagatccattagttgaaaatgccgtagttcagttgtggcagtcctaatctgcatctggaacaactcctttgtcatatcaacactcatagtaacccacttacagtgttgcgccaagtaaattcttatgtttccattaaacaaaagcgccaaagttgtggtataccactttttcagtttatactaataacgattaattactcttgtagaaagcgagcataccgatgacattccgcgattatttccatttattttcgaccgtttctcaacaagccgaatcctatgattattttttacactttattgagacacctgttcctgatttacaacggtatcccgaattaactaaaatttgtgattgggccgcttatgatgatcacagttttcgtctgtggacaagcttgcccctcgacgaattcgagcagcgttttgctgaaactgtcccattaccaagcgattcttaccagttagattacagttacaatttgcaagatacaaattttttctaaagttcatgcttgacttttaattcgaactaccgtaaattgaataacaatcataagtcatcttaattcaaactaagtagtgcattatctgggtgtcagaaagtcggtggttgctgcgaaccgatcagggtaattgttacgaaatactgaatggatgattcggctaattaacaggaccgttatcacctgtaagagtggtgtgttaccttaaaatgacacgctaactgggtggtaccgcggtttccaatcgtccctattcgcatcagcgagtagggactttttttgtagagtgcgttatttagcgcttaatatctgaacatttgcatagaacattgccaatcaaaaacacatttcaactatggagggattttcatgttcaagattgcatcgtgcgggggaatcctccgttatcagtcttttgtcgcaccagcctaaccattaaacttaaaaggatgcgatttaaatgacaaaacacaaaactagtttattagaagcaagtatcgttttacttattctgctagccatcatgggtagcggcgtgattgttttccaactttcaccacaaacacccgtcttaacggcgattgccctcttgattctatgggcccgttggcggcactttagctgggacgccattcattctggtatcgaagatggtctcaaaagcggaatcattcctatcattattttcattctcgtcggcgccttaatcagtatctggattgccgccggtgtgattcctagcctgatggtctggggcttcaaaatggtcagtgtacactggttcattccctcgattttcgtcgtctgtgcgcttgtcggcagtgccatcgggagcgcctttaccgtcatttcaaccgtcggcattgctttcttcgggattggagccacactcggactaaacactaccatcgtggccgcagctattatttccggggcaatattcggtgataagtcatcgccactttcacaatcaacaaacttaaccgcagcggttactgaaacagatctatttgaacatattaagaacttgatgtggaccacggttccagcgtttgttggctcattaattttatacgctatcattggccacacctcgaaaaatgtctccctcgataaaattggtgcgacggttgctgtcttaaacacgcacacttcagttagcctacttgcactaattccaattatcttaattttcgtttgtgctcgccttaaaatgccagcaattccaacactctttttaaacattgccgtttcaatcggtttaatctttttccacaacccacacacaccaattgctaaaattgcgagttacattgaaaatgggtttgttgcccacaccggcgataaaagtatcgatgccttgctctcacgcggtgggattaatagcatgttaagcaccgtcgccttaattatcttgaccttaaccctcggtggcctcttaatgaagcttggtttaatcgaacgcgtgatggcccctcttgctacccatcttaagacgccaggtcaattgctcagcgccgttattgcttctgggattggcgttaacctctttatcggtgaagaattcctttctgtgattctccctggtaaagccttcaagagcacctttgaaaaatcaaacttgagtaatcttgctttagggcgcgcccttgaagatggtgggacagttatcaactacctcgttccatggggcgtcgctggcgtttttgccgctaatactttaggcgtccctaccttgagttaccttccattttgtttcttcagtctcttatcaccaatcttctcaattctcagtgccgttactggcatcgggttaaagagaaaaaccgcctaaacacgcaaaaaaggcccaggataaaatatcctgggcctttttttacattaattgcattaggaattgaccgccatacaccagcgcaaaactatacactgcaattgaagctggcttgcataaaataatgatccatgtaaatttcttcaatgacatctcggtgagcccagccatcaagcataagacatcgtctggtgcgaccggtaagaaaatcgcaagtgcgaagaagcgcacaaagtttttcttttccataattgtcccgatatacttgtcatacgttttttcactgatgacgtgtaagatgaacggcttcccaaattgtcgtgctaataagaagttcaagatagaaccaattgcaatcccgacgtaattataaacaaacccccaaagtgggccgaataccaaaaccccggctgcggtgctaatcccgcctggaatgacaggaatcacaacttgaataatctgaatcgtgatgaaaatcagcggaccaattagcacagagtgccccaaatacgcctgcaacgcggtcgtgttattaaaaagaccaagccgagaccaataaatagccaatgagatgcttccgattaatgccatgagagacgttgcgctgattaagcgtcttgaaattgttctactcatccgctgaattccttccaaggttaattttaattataatttaccacattcaacattattttttatcggtcgctagtctgatttaaaaaagcttaactttctaagaacgtccgaaatggtttcaatccttgtgcatgatatttttcaacaaaggccgctacttctgctggatcctgtgtttgatcatcaatcacgagttgttcaacgggtaacggacgttcgttagcaattttaacatcaatcacaacaggttccttcgtgcctttagcagcagcaaaagcagctttcaattcagctaatgtccgtaccgtaaatccttttgcgcccatcgctgttgctgctgcaccgtaatctgccccttgaatggcaacccctgagtgtggttgacccttatcatcttgttcagcttcaatgaatccgaatgaatcgttgcttaatacaacgttgatgattggcatttggtatttaacttgcgtgataatatcttgcatcaccatcgtgaagccaccgtcaccactaatcgaccagatttgacggtcagggtaggcagcctgggtcccgattgctgcaggcactgcgcaacccattgtggcataccatgctgataacgtcatacgttggcctggatgcattttcaagaaacgcaccccatcgattgaaacattcccaacatcgagattaaagatggcatcgtcagtggccatctcattgatttgtttgaagacgggttccacacgtaacggtgtttgatcgtcttcttcaaaactggctttccattcattccagttttctttattggcgagtgctgctttataaaaggcagattttttggcaactggttcactcgcggctagcaatgcctttaatgccgtcttagcatccgctaaaattccgacatccacatggtgtctgtgtcctagtttagtaggatcgatatcaatttgaataaatttggcatctggcttgaagaagtattgaccgaattcataattgctaccgacaaataagattagatcagcagcttctgccaaatcaactccgggtttcgtggctactcgcccagctgaaaccatataagctggatggtcatcggcaacaatcccttttgaaagggctgatgacatcattgggatactcaaccgatcagataaagcaaccaattcttcacccgcagcacgtgcaccttgaccaaaataaataatgggttgttttgcatctttaattaactgtaatgtacgatcaatatccgcgcttcttggctctggataattgcccatttggaataagtttgcagtggcctcgaagttatcttcaatcggttcccagcctaggttagttggaatcgtgacaactgctacgccgcggtgtttataggcttgttgaatggcttggtcgactacaagtggcatctgttcagccgtcattaccgtccgattatagactgccacatcagcaaacatggggttttcattcatttcttggaaataatccgtattcatcacacccgtagcaacttgtccaactaatgctaatacaggaacattatcatatttagcatcatagagaccatttaacaagtggactgcaccaggtccggctgagccaaatgtagcagcaatcttgccagttgctttggcttcacccgccgctgctagtgcaccgacttcttcatggcgcacttgaatgtaacgcataatcgctttctggttatgtagtgcattcatcgttgaatcaaacgagccaccgggtaaaccaaaaatatggtcaattccccagtctgccatgacttttaacattgcatctgatgcgtttattttctgtgctaccattaataaagacctcctgatgattttatgtttcacttacttaagtataccgcttaaaatgtaagcgttacaaataatcctgaataattcatactttgttgcgtaaaggtaatttgccccttttaacgtttaatttagctcaaatttaatccgcaactatttttgagtgtatttgagctatttttaagacaattttatttttgattggtgtcaaaagagtaaactactcccttgatcgtacttaaattttttaaattgtcttttttaattactagtgagctgaaattcttgaatcctaaacaatgtttgccagtataaatcatcaaaaacattggtactagaaagatgcagccataatttacgtgcatgttgggtgactctgccggccaaatgaaagagcttgaaacgtaaagtggcgctcgttgcgttccctaattcagctgagaaaaccagttttttcatggcttgaactaagttataagccacaccggcgagtaacattctaaactggttagccgtaaaactggaactatccgttttatcaaaggcaaagccacttttaacttctttgatcagatcctccatggctccacgttggtgatagagttcaaagacgtcactggcaaaagccagctccaagttagtcacgataaattcgtgtttaaagagtagctcgccagcagggcgagttgatttaatgatcacggggtaagcgcgaccccaagtgtccggttggtaatctgtcaaacggtgccactggacatctttttcggcgaagtcttccccaggttgccccacatggatcaagtgctcggcgatccgttgtagttttggattagccttgagacggatcgtaaactttgccccagcttcttcacaggcggcataaatttctggcttggcaaaacccgagtcagcccggactagtacatctaaagcagcgtattgtttcagtagcggtttcaaaaaagcttccgcatttttggaagtgtattcgttacctggccgtaatttagctcctaagagacaacccgaaaaaccatcaaaagccaacaggggatgataaccgttcgtttgataatgggtgttaaaagcactgcctttctggtaaccaaatgtatcggaatgagtcgaatcaagatcaatgatcagttgacgttgcttcttttgtgtgatcactaactgcgctaacttggcgactaattttgtgatcccggccaagtcgtctgcggaaatttggttgatatagcgtgaaagagttggttgcgaagcaactaaattatctaaaacaagctcaaagctcatgtctgcggtcagtttattagcggcagtatcgtcgaaataacccgcaatcagctgaatcaacagttgtttaaacagctggttcttatggtacctatagaacttgcggttttccttaaaatggagagtttctttcaaaaggcgcttaaagtggatctgatgcataaattcagccactaaaattagacccgcatcgttagataaatgaccaccattattagaaagaaccagatttttgttgaagttaacggtttgttgttgtaaagtcgacatatggagcactcctgttctgtgttggttttggtcgacttaacaatagcacaggctgtgctctttttgtatacgcaattaaacacctaaaaggtgttggtttggatcacggacaaacaagatgataacaggcaaagaaagaaaaactgttaaagatatgaattattcaggattattattagtaaaaatatgactcctaacaagcaaccgcagccgatgttgaaaaagaagctcaaaacgctccacacaaaaaggacgcataatataaacaggaatgtcagcatcattgccacctctttatttgcaaaccacgctcacttttaccggcttagatcaactttttcattgatcagccacacaacaatgtcgccaattaaaaccacaacaaattcaccaatgccgactgtcaaatatgtcatccaaaacaaaacttcactgaccagatgtaattctagtgcgactgcctatgacattccggccccattgatgactataaattagcaatcaaacacccctcatgtaacgtttgttgaaaaccaccatagtattgagcagttctgacaaacgaaattgaatcggtctataactcaatggtgtaaaagcaaacgttaaaactacataaagtgcagcaatcaaaactgttttagtgatctcagcaactttattattaagacgtgccctttttaagaatctcctagtttttaggtgggatggtcacgaaccaccatgtaacaagtaattattccattaatactgtactttcaagtatagaaaaaagacgaccgtttatcaacctgaaaagcatgttataattttattattagacattttaacaaccgagtaactagtcgctaaaaatcgtggatcaactaactgtctagcctaacaaatatttgacacgacccacgaaatttatacaatgaatggatattactaatgaaaatcgctattttaactgacagcgctgcgatgatcagcagtaaagtcggatcacaaccgaatattagggtcttacagatcccactttcattggatggagaagcttattatcccaatgaattaccagaagttgctggaatagaaacgctaagggaagccacgcttaacactgtaacagaagagcagatccctctaaccacaatttctgcagtaaccgatgaacttcaacaagctggttatactgacgtactttgtatacatattgccagttcgatcagtggcttaggctcaaatctctctactttcgccaaaagctgtcaacagcagcttaagatccatctctttgattctcatactcttggtcctgcagaaggagcgttggttgaacgagcacttactatgattactcacggactaaaaattgctgacattttagcagaactaaccaagtatcgccaaaagcaacatacactggtcataatggaaaatctcaaaaacttgcgtcggatcggttctatttcaaataatgcacatctcttcagtaataatatgctgcattataaaaccttgctacatttttccgaaaatggtgaacttgaagtcttgatgaaaagttcacgcacgaaaaaaattgcaacggcgctattgaataagtttcgcagctctgcagcaaaaccggaactagcaatcgtggcagacaatacaatggtcttggaaaaatatgtttcttgcctgaaagaaattatgccgcaacttcaactagtaactgatctatattcaccttcgatattttccttcatcggtccacaagcactgatcattagttggcaaaataattaactacatgcaaaaagatcgtccttcaatttaaagaagaacgatcttttttgtttgcagttctcttatattaactttttgctatttaataacggactcgcaattggccagcttctcagctttctgcttagttatctaaatcaaattgacccgtcagtttttgcaactgagcagcagtttcttccaaggtcgaaacatgttgggtaaactcatccatcgtagcttgcacttcttcagagttagccgaaacttcctctattcctgctgcgttttcttgtgttgaagctgagatgctttcaagtttatctaagatcatcttttgagtttcactgatctcttttgtaccctcatggatcttttgaacatttgcacccatagcttcattatgcttataaacgttcattgtcgacttgatggcttctgtgatcaaaccagtctgtttttcactgctttccagtgagtctgttgttgtcttgaccaaaccagttgattgctgtctgatctgttcaatgatcgactcaatttctttagtcgaatcattactttgttcagctaacttccggatctccgctgcaacaactgagaatccttttcctgcttcgcctgcactagccgcttcgatcgatgcattcaaagcaagcaagttcgtctgtcttgcaatatcattgataacgttaatgatcttagtaatgttttgtacatcactatccatttcctgaacactactcatcaaagcttgcattccgttgatctcatttgaccagttaccattgaccttgtccatgacatccaggttattttgtccaacttttgaagcttctttggatgaattagcaagctcttccatattcgcattgacattatcaatatgtgcagtgattttttgaacgttatccacgctttcagtagtttcttttgcttgtgatcctgtcacttcagcaatttcagtgatcgtctgtgcgatttcttcagaagcagttgttgtttgtttcgaaaggtcaagtaatgatgcagctttttcagaaacattcttggcttcttgctgtgtttgtccgatcagaacagtgacagaagcgatcatattattgtaactagccgctaatctgttaaactcatgtccattcacatcagctctggtcatcttttgagctagacgttctattggtaccttagaatactcgattttttcacccactgcaggcacgtaactcatcttaccttggccagcatctataaagaacttctcaagtattaataaagcacgtttgagcaaacctgcactatagtaagatattatcacggctaaaatgatgatcgccaacattgagattgtcaaggttatcaacatatgatgtgtgcctgcgctcaaatcactattgttcatttgggcgatggtccaattgtcagttgtgccattgcccttgtcaaaggtaaccttattgatctgcgaacctccaggaactttgatcgtccccttctttttcgctgaagcagccactgctttataaacggctgtcttgttgatcattttacctgctttaaaagtattattgcttttaccagtgttctttttgatcaaaaccctgccggctttagttaaaacggcggcttgaccattgtttccgatttccatcgattcaacagatttttgtactgatgaatatgaaacagtaactgctaaaacatgggctttcccctgcttatctacgattttctgggaaacacttgcactatacgaatgattagccggatcttcataaggaatcgaccaatatgcatgtcctgtgggtgctttttgataccaatcttgatctaaaatattcatatctttaggcatcgcaaaattcgaataagcatatgtaccatcagtgttgacatacatcaagttggtgatcgttccctgggcgtcgccattggcaattttcaaagttctgttagcatcttttaagttgacattattggtcaactctggtcttttttccaaactagcaatttgtccagtaacatcttgccgcatgtcaacttgttgccgttgcaaaacatttacagccgtcacttttaaacggtcatttttctcgatcaattgctgacgtgtattcccgtatgagatcaaattcattataattgccggtaccaatgctatcaataagagtgacgataaaaaatacttctgaatactctttttagcaacttttttcttacttgccattttctttccccatctttccctaactatctaatttgatcccctaaggatctcatgactatcgttcacaaaagcactgaagcaaacaacccctaaataatatgtttgccagtatttgcttttgcttgcgctgaagtcatcaaattaacgagcaattactgctcttttacccctttagccccactaaaacaaaacataactttaacgcagataatctaatatcgaagtttgcatgaccttagtccccatagccaaggtcgaacgatatgcaatcatttgattttgatattccatatacttctctgtaacatcaacatcttgtttattagataaagtttccgctaaagtatttttctcagatttatttcgagctgatgctgaacttaaacgattttcgatcgaaccgatcttagatctatagtcagtaaagttttcagtaaatttatcgatccctgacaaatattcactggataactttctatctggatcccccgatttcaaagtatcgatcaaaccgctaaagaattcggtcagttcagacttgctatctttatcaatgccagacgaaccatcggcatgcatcaaacgtgaaccatcagtagctaaatctaagctgacaccatctgagatctcgcgctgtaaattatccacgttgcctctgtattctaaactgacagctgccccttcagcatctttaataacagcaaatggtggctcttgtgtctttgtccccccaaagatatacctgccatcatagttggtattcaaggcatcaactatccctgagatcgactgtgagatttctttacggttcgcattgtaaacggcaggtgtagctgttccgctattggccgacgactcgatcaaatttctaatgttaagcatcaaggtcgaaacattatctaaagctgagtcttgcgtttgcgaccagagcgtggaatcagaaattgtttggccatacgttttgttttgtgaaattgaaacattcagatctaagatctttgcgactaacaaaggattatcagaagccttattgacctctttcaaactagacagttgattcattgtcttttgaaccttgttagtactgatctgtaaattcttcaagaaatcagaatattccattttactggaaaccctcattgattaaacccccgttctattgatcaaagtatccaacatttctgaaacgacatttaacaatttggcattagcttgaaaaccttgttgaaatctgatcacatctgacatttcttcgttcaaattaacaccagaagctgcttgatctttgtattccaattgattcaacgctgataattgagcagatgccatattgtctgctttttgtttagatatcccattttttgtaacaatactgttgtaagcacctgggatcgttaaaccctctttagaattattgaaggtcaaagtatctttattataatttttcagcaaattcgctgtatcgaccggataaccaagcttactctttaaagctctagccatcgctaaagcacgtccattatctccttcggccggatcatcaccagtaccgactttcattttgcctggatctgcgactaaatcatcgttgatcttaatacttaaagccggatcactgagatcagtgatttcaaaaaagccgctatctggagtttgcccgtcagaataaacgatattttcaatttctacaacgcctttagcaaaatcatttaattcagctcgatggctttccacttcagccaatgattcttgcaaaccgccgatcgaacctgacttaactgctaacttgctatacttacctgaaccgttcgctgtttcaaaaacgacttctccgaccgtgaagtctccatcgatcgtttgctttggttgtgtttcatcaccatttggcaaaatctgagctttgccgtcagagttactgacaacaacatttaacttagtctgtactcctttttcattgtcaaccactgcatggtcaccgatactaagtgaagcacggccatatttgtcaaacgaaactgttaaattactttcagcagacatatcctttaataaactatcgcgctgatctaacaaatcattgggctgttcatcacttaaatgactgtcatacaactgttgattcaaattagcgagttgttccgccttttcattaaaatctagaacagttttcgccaaagaagaacgtgtatcagtagaaacttgtgaaacttgccgtgcagtttgctggatataagaagctaaagcaacacccatttgaacactattagttttagccgtatccaactcgggattgtcggctaacttttgtaagctgtcagcaaaattattcaattgtgtaatgagtccatcgtctgacggctcatgtaatgcattttctaataaagccaaaacatctgacttttggacgttaaaattgtaatctgaattagaatctcgaacctgtgaacgtacaaagtcatcaacgatccgtgagataccatcagcttgaacaccgctaccgatcaaaccgactcctgtttttgcataagggatcttcgttgataaatcaacacgttggcgcgagtaaccttcggtattagtattagcaatattatgactgctagtctgcaagccgatttggttagcatctaacccactgcgagcagtattcaaagtaccaaataaacctgacatgaaagtcctcctaaagaataacaaggtgaagtgaaccgcataaaagttgagcactatcggactttgacaataagtcgtggtttgcgacttgttggcgaagttggataggcacagacttttggttcacgcaacctgactaagaataacaaggtgaagaaatgcggttagaagccgagcattaacggactttaacaataagtcgtgcatttagcgactttttgttgaagttagttaagcacaagcttttgcatttcgtaacctgactaataacaaggtgaagtgaaccgcataaaagttgagcactatcggactttgacaataagtcgtggtttacgacttgttggcgaagttggataggcacagacttttggttcacgcaccccttctacaacctaaaatgactgatctacgattgccgcaggaatatcttctcgcttaggttgactttgagtcctatgctgatcaacataagtattttcctgtttttccaagctgtgttggatcgtatccatcatttttttctgataagccaaggcttgttgcgtcaacaataaattagtttcttgcaactcttggatttcttgaatcagcatctttgttttgtcgccaatttcaccagtatacttctcaaaaatcggtaagaaatcttccttttgcggaacaatttcatttagcgattctccgtcatcaagaactaaaaacttttgttcacgtttcagtattttgataaataatttaagcttagcctgaaatgccttttcattcatctttatttccttcttgtttcatttcctggaacatctgatcagcaatcttttctggtgagaccttatatgttccgtttgccaactgctgtttgattttgtcgaccttagccgcatccacatcatcgtctatatcacgatttttagcgttgtttactaatctttgagcagtatctgataatttaacattaaactgttgtggtgcaccctttttcgttgttttcgaggcttgattgtgatagtagttttggatcatttgtgaattgattgaagaaatatctcgattaattttcatgtgaatgcctcctttttcctttttgactctacaaatacagttatcggccaaaataaaaaaagttaaacctaaaagttcaactttttttaacttaatttattttattgatcctttgtttttgagaaatgatcttattgatccgcacgccaaagttttcattgatcacaacaacttccccagttgcgatcaattttccgttcaacatgatctccaaaggttcgtctgttaatttatcaagttcgataactgaaccagtgttaaagttcaaaatatctcgaacagtctttttagtccgccccaagacaacgcttaggtttaatggaatatctaagatcaaatctaagttatcaccgctgatttcttggtgactcgacaattcttcaaattcgggtttagaaatttccacgttactgacctgcgcctttctttgtggttgttcattgcttggtttttgcgggatcttaacttgttgcggagctggttgtggtttactaatagccttggctttctcgactgctggtttctccgcatcacgtttgacaactgttgctttgtcagacatcattgctttcacaatatctttgaccatttccaaagaaaagatctgcataatttcactctcgatcagtccttctacatccaagttaaatgaaatacaataaatttcttcctcacggtccaaagagtcttcattcacatcgccgggattttcccacaaatgcacttttggaggaagaatatcgactttttggttgatcatagtagccatggatgtcgaagctgaaccaatcatttgattcatcgcttcacccacggcacttaattcgacttcagtaaattcttctgaagctgactttccatcgccacccatcatcagatcagcaataaccgttgcatcactgacctctagcaacattaagttagttcctgctaaaccttcacgaaattcaacggtcgtagcaactttgggtgcatggatctggtcgagtaattcaccaaaatggatttttttaacacgtggtgtcgtaattgccacacgatgagtcagaattgatgacagagttgttgctgcctgtgacatggaaatattaccaacttcaccgatcaggtctttgaccccttggcgatctaacccctccaataattcttcatcatctgattgcgcagcttcttgagcatcactgccattcatcaaagcatctatttgttcttgtgttaaactctccgtcattcttcttccccctcgatcttgctcaataactcaattgcgaattgtccattctttttccctggtttgacccagtaaaacggtcggtcttcaatgtacgtatctaacggactggagattttagagtccagcttgatgacgtcacctggttctaatttcaagaaatcagccaagtccatttgggtgttgcccaaaacgacttccattggcagatctattgcgtttaacccgtgttttaattcgctttggtcatcttcacttaattcctggcttgagtcgaaccaattatgcaaactcaatttatctaggataccttcgaatgaaacataaggaatacacaagttaataaatgttgaaactccgaaaagctgtactgtgaaagtagctaatacaactggttcattaggtgataaggactgtagtaattgtggatttgtttctagagattcaagctcaacatcaagtgtcaggacttctttccaaactgattgcaaaattttagagaattcacccataacctcatctaataatgttaattcgatatctgtaaaaccatttttatccaaaggcggttgattttttcggttactctccaaatcagcaccaccacacaacaattcgactaaagtcatacatagttggggattgatttcgatcatgtgtgatcctttaaggggagctgctttaaacattccgatcaaagtcacacgtgggattgaatgaatgaattcgtcataactgatctgctcgatcgatgctaattgcatatccaagttagtccgcaagatatttgaaagaacattgccgctcatcttagcgaagtcttcaaaaatcatgtgtaaggtatttatatattctttagatagccgtgtcggccttctaaaatcgtatggcttcgcttgtgattcgtcattttgctcttcatcgatcacttcttcgtctaattcgcccgaatcataggcatttaaaagtgaatcgatttcctgctgtgataacacctgatccacaaagacacttcctctcgctcattagttcattccacaattaaaaaatcttatcattaacgtcgatcacatcagcaatcgtttgttcacccaagtctaccacaccggtaaaataaagggcggcttgatcttcacttagttgaatatcatcaggatcaacatccatcacttcgatcacttcatcgatcaataatccacgacgttcatcatcttttttcattatcataatatttcggtttgtttttgattccggcagtcctactaactgtgccaagctgatcaccgtcaacactgtgcctcgcaaatttatcaagcccttgacccaaagcggagcaagcgggactttggtaatttgaaccgtatcaacaacttcttctacagtttcggcagctatcaaataatgttgctgattcattttaaacaaaatcatctgcattaaaacacactccctttcttaattaaattcagtcaatagaactttaattaagacaatgccttatctaaggctttgatcacccgatcagtatcaaaaggtttgacgataaaatcgactgctccagctctgatagcatccatgaccattccttgttggcccatcgcactgcacattacaacttttgcactgctatcaaattccttgatcattttcacggcctggatcccatccacatccggcatggtaatatccattgttaccaagtccggtttctcagactgataaaggtcgaaggcttcttgcccattttgcgcttctccagcgacctcatagccgttcttttctaaaatatcctttaatttcattctcataaaaacagcgtcatcgacgatcaaaactttatttgccacgcgacattctcctctcaaactccaagtgattttatcattttgtcaattacacccaactctgggatgaagtatagtgaagcttccaagtaattagaatcataagtaaattcatttctgatcaccatgatctcatcaccaaactgttcaaattccatatatgcactactaatcacggcaccaaacatatcaaacgaacttaccggaacttctggttttaatttcttttccagcatcccgccgatcgatgttaaaaatgaacttgaaacaatgttagtcaattcactaactgcagaaaccttaatttcttcggtcacaccttgatctgttcccatcatcaaacttgagatctctttagcggccgggtccgtaataacaaatagcatcgcaccctttaagtcaccatggatgctgcttaaaacggcataaacttcctggtcatcggccataacttgctggtaaagctcgtcataacttaagatattgacttctggaacacgcatcctgatcacactgccaaccatttgtgatattgttgtagctgctttgccgccgccaatattcataacttcttttaacgcatctaattgtatgtttgaatatgccatcttaacccacctgtgcgtctttacagatcgtattgacgtccaagatcaatgcgatcgagccgttgccaaggatcgtcgcgccttggaatcttttgattttttgcaacatcggatcaatcttcttgattacgatttcttgctgtccgatcaattcatcaactacgatcccaaagtctttattatcacccttgatcaagatcatatatttctttccctgatccttttcagggatattcaaaatgttggcagtccggatcactggtgtcaatcctgtctgtaaaggatagacttcctgactagcagtttgtaaaatattatcttcatggatcatttcgacccgttcaacaacatctaacgggatagcaaatgtttcttcgcctagtttgaccatcagtgcctgaataatagacaaggtcaacggtaatttgataactgttttcgtacccacattgactttactgtcaacttccaatgaaccgcccagttcgttgattttagcttgaacagcatccaagccgaccccacgtcctgaaatgttagtgatctttttagccgttgaaaagccaggattaaagactaacatttgcagctctttatcactcataccggtcgtatcgattccacgctcttcagcggtaattttaaggacttgtggatcaaggcctttaccatcatcgctcaaagtgatcatgaccttatttccttcttgataagccgataattttatctttccttcttccggtttgccaagtttctttctgttttcagcatcctcgatcccatggtcggctgaatttctaactaaatggatcaagggctcactgagttcggtaaccacagttttatctaattcagtttcttcgccctcaatttcaagagtcatctttttatttaactggttggaaagatcgcgaaccatccgtggaaaacgactaaagacaacgctgacttgctgcatccgaattttcaaaaccaaatcctgcagttcagatgtcaagcgtgaaacctgttctaaagattcatgcacttcttctaaattttggcgactattggcatcttctagttgattgcgataaacgaccaactcagatacaacattcaaaaaggtatccaaccgagaaagatcaactctgatcgactgatttttggcatttttttgatgcgaagtgctcttcttagacggggcttttgctttcttaggttcaggagcagcgctttttttctcagtagtattttctttgtcaacagctggttgtgcgtctttttgtggttcttcagcggctgccttttgagttttctcatcgaattctgccgtcaaaacttcagcgatctcactactagattcaatgatcttcttaatgtcatcttgattactttcagttaggatcaacaatttgaaatctgtatcaaaattgccttcttccagctggtcaggagccggttcagtgtgaataatatctccttcactgtcgagcttatcgatgactaagaatgctcgtgggcctttcagcattgactctggatcgattcgaactgccgcactgatcacattaagatgttgtgttttagcctgttcgatcgctgataagtcagcttcttctaaagtttcaaatttcagttcgagctgactatcttctggagctttcttctcatctacatttttatcagcggtttttgtttggccgccatctaattcattttcaactttatctaattcattccataattctgtgatctgatcttcgctttgttcttcttcatctcgcaagccgtctagaagttcggtcaatttatctaagcaccgaaaaatcagagaaatatgatcacttgttaccttcaacttgcctgatttgaaaagatcaaaaatatcttccattttatgagtcaacttgctcatgacagtatatcccatagttgctgacattccttttagggtatgtgcagctctaaaaatttcattgatcaaatcgatattgtctggttctttttcaagttctagaatattatcatttagttgtgttaaattatcttcgctttcttcgaaaaagatatcgcgataaacactattatcgtcagccatcaatgatccccccattcaaattatttacacctaagcacgaatggtctgtgcttattgttaaagtccgctaatgctcgacttttaaccggctcactccaccttgttttcttagtcaggttgcttgagacagaaagctccgcctatccaacattagttccacatcgcaaaatacgcaatctgaatctagtgtccgatagtgctcactttctcccgtctcactcaccttgtttctcatatataaacgactctattttctttaaccccagcttttctgcgctgttaagtgtttctgttgctcccgtgaacaatattccacctggtaccagcgcctcacttattttttgataaactcgatcgcgtgccatgggtttgaaataaatcgttacattgcgacaaattatcgcatgaaaacctgattcatactggtcagccaataaatcatgtttcttgaacgaaactcgttgtttgacggctggccctatttgatactggtctggtcctaatgacttaaaatatcgtctaacatcagtatcagaaacattttttaactcatttgtcgaatactgacctaaacgtgctttctttaaaatgtcatcatcaatatccgttgctagaacattgcccataagatgatttttttctaagatcatcgctaaggtgtatggttcggcgccggtcgaacaagccgcactccatagtttcaaattattaaattgtggagcaactttttctaacaaacatttttcaaaattactaaatatttcttgattgcggtaaaattcagtcacattaattgtcaaatgctcgataaactccgctcgtttgattggatctttgtccaaaaggtgttcatattcatgcaacgagttgaccccgtttttatccataatatttttgatcctgcgttgcatttgtctttctttataatcatcgagatggatatgatatttctgctccacccacctattaaaatcagtaaaattttcttccaacattttaatttcacccaacgatcgtctgtagtattttcccgatctcatgcaaacttacaacttcatcgacaacttgagcttcaattgcagatcttggcattccaaaaacggtacaagattcctgatcttcagctattacataaccgccttcatccatgattgtttgcaatcctgccgttccatcatgccccattccagtcaggataaaagctgttaaattagcaccataatgagcagccgccgtttcaaacaagtaatcaacggctggccttgtcccatgcatcttcggacgttgatctaacttgagccggtcaccttggatcgtcatgtgataattaccaggacacaagtagatctgatttttgaccagcatattatcactagcctcaacgactgtagcgccgctttcttcatttaaacgctcagaaaacgtgcgggtaaatcccgctggcatatgttgtacgataaaaacaggaatgtttgtatgactcacacctttaataatttctaatagtgcttttggtccacccgttgatgagccgatcacaacggcttggggcctgatgttacgctttttatgtgctccgttgggtttggctttatgattggcagcaactggcggtttactagaacgtccgcaaatatttttgatctttgcatacagttctctgacccactcgtcttgaatttccatcaggttcacaggtttttcgataaaatcggccgcaccatattctagagctttgatggttactgcctgatcactgactgcacttagcattatgaccgggatagaataatcctttttgatctgtctaagggcgctcaagccatccataacaggcatttcaatatccattaaaattaagtcaaaatcattatctgcatcaaggatgtccaaacaatttttaccgtttcgtgcaattcgaaccgttgaaacactgggcattttattcaatatatccgagatcactttgcgcataaatgcagagtcatcaaccatcaaaatcctattcataaggtataagaatcctttcacatctttacttttctctcttaaacaacattctcaagtcatcaatgagcaaattttcgttaattaaaaaacagtacatagtttttaaatgtatctattttcctgtctcacgaccctgatcaaggtcgaaaaatcgtttaaatcgacgaccatggtccttccgctgctgccgcccgtatcttggccaactaacgggatctgcaggcttgccaactgatttaaaacagcgtcaacatttctctgaccaatattagctgtcgtgaggttgtttttaaatccaaacatatttgcaccaccagagatcttagcttgaaatttagctcgtggtgctttttgcttaagttctttgaccatcaggggtaacgccgtattggcatacttagccaagttcaaacctgaagtcccgttcttttcaaacggtttactatcagggagcataatatgactcaatccaccgatttttgaaactggatcataaacgatcgttccaatacaagaacctagccccacggtcattattttattaggcgcgtatgaaattttataatcagagattcctaccctggtttcgttagtgttctgcagcatcatccgtattctcttctttttctgaattttcagtaatggaatctacggatgaaatgatctcctcttcttgtgaagagttgaaaagataatctaagttcaactcgatcactacttcatcgcccatcttcaaaaattgactgatatacgggcgcttcagtgatgatctgtccaaatctttttcataatccgtctcagtcagcgacatgatccctacgatctcctcgacaaagatccccatcgtccgttcgctccaatgtgccaagatcaccttatagtccagcgttgcaggcgataattcgccgtaaagccgcttactaagatcaacgattggcaacatctgttcttgatattcatacacacctaatacatagtctggcaattccggcaacgagataaacttttcagtttcgatcactcgtttaaccatttcaactggcaaagcaaaaacttgcttatgacttttaaaaacaacatattgtcccatttttgtacccctctttaacttctacaactaagaattgacgctgctagttttttaatttgaaactgccgatttgcaaacgtctgatctcatcagcttgttgaagctgttcgacacttttttcgagttcttcgatcaaggaataaaaatcatccaagttagccgatacttcctgtgtacttgcagaagtttcagcgatctgtgaatccatttgctgaatagaattattgactgcatcttttttatctttgatctcatctgcatgtgaactaacatcggttaggccatcgctcaactgcgtgacatcctcggtgatttgttcgctagccttcagtacaccagaaatattcatctgctgttgctgactgcccttgtatgatgcatccagatcaacagtcattttcttagacttagcacggatcgattcgatcagttctctaatattagtggttgatttgccggattgttctgccagatcacggacttcctcagcaacgattgcaaagcctttacctgcctcgcctgcacgagccgcctctattgaagcattcaaagccaacaaattagtctgttctgaaatatcattgatcaactgcacgatattgccaatactttgaatatcttgattcatcgccgtcatttcagaaacaatcttcttttgactttctgtttcttggttccaagaccgtgaaacttggcgcatcatttccatgttttgaatattactttgctttgattcgtcagcatagctattcattttttcaattttctggcgtatctcttcaatttggtcaccaaaaacattcatttgagcaactgtactttgagaagctgttgcttgctgtccagcattagtagcaatagtccccatcgcttgacggacaccatcgatcgaacttttagcgtgcgtcgattttccacttagatcgttgaccattgtttccgactgctcagtttcttccttgatcccagttaataaagctgaaaatgcattggctaaaccaagcaactggtcacgagttttaataaacattgggctttggccgggaactttgccgatctcgtcgatctgactgaaatctccctctaccatcttaccgacctgaacagaaagtttttttaatccgccggcttctcctcctgttactgccgtatttttatgaccaaatagtacatacaagagatgcaaagcgactacaatgaccgcgagtatccaaaaccttctcatctccgctgtctgtgccgaacttaaaacaaaagcccgaaaaacaattaaaacaatgactgtccctaaaactggcaagaaagctacttcggagttagcttttttagccgtcttcttacgtttttccatttgttttccttccccatataaaagatttggtatctgtcataatactcacttaagcaaaacgacactccaatctgttatatcggttaaaattttatttttttaaccgtttaccaaacatagacatcttttggatcagaaaatcttgaatatccaccgtctggatcatctcggatcagttctccattttttagttccaaagttcgatgacgcaaagaattaaccatggtactgtcatgtgttgctaaaatgatcgttgtccccatctgattcaggcgaaagaaaatttgcatgatctctttggccgacttaacgtctaaattagcagtaggttcgtccgcgataataactggcggatcattcaataacgcacgagcgatcgcaattttcttttgttgcccgactgaaagttcctgaggcaaccgctcaataaatagcatcatttcgacactggtcaatacctctgccatccgctcttcccacttttcagtggggatctctagcgctgacatacaggtttccatattttctttgatcgtcaatcgcggtaaaaaaaggtctttttgcgaaacgatccccaattgacggcgtagtttgtatatctgttcatttctcaaatattcaatttcaatattgccgatccgggctataccagaatcaatggagcgttgagcacttaagatctcaagtaaagttgttttcccagccccacttggaccaactacataaacaaattcaccttgttcgatcacgcatgaaatatttttatttgcccaaacattgccatatttttttgttacatttttaagttcgatcaattttttctcctaaatcagtcggtaaagtggttgatggtctccatcatttcatctgtagatgaagcagcgcgggcattcatttggtaagacctctgtgctgttaataattctgtcatttgagtagccagatctacattggaactttcaagagttccttgcatcacactactacctgccccagcggctctaaaaccgccattggctaaatacaagttatcaccaactgacaccaatgaatgtgcgttgtttggttcaaataaacgtaaagaccctaaaacctgatcaccggatctgatcgttccgtctgaagaaactttcaagtcccctgctggccaattttgttctggcacccgcgcgtcaactgcaacccgatagccgttgctggcgatcaaaccaccgttagcatcacgatgaaagtctcctgccttagtcaagtatgtattaccatcgggaccaatgatcccaaaaaaagcattgccgttaatagccatatcaagtgcacgaccggtcgtttcaaattttccgacttgatcatcgactcgtgctcccgcggcatttagaccagtattcgaatcaactcttgcattagaattaccaagtgcaccgtcgctattagttaaattattattcatcagctcattaaatgaattgatgattcccttatagcctactgtgttttcgttagcaatgttatgtgaaacattatccagattattttgcaagccgttcaaacctgttctgttaatggataaaatagaattcaagttcatttttacttactctcctcatttcctacatgatctgttttctcaagcctatactaagtaccatcaagactcactgtacgcctgagaaaaataaccaactatttgatctagatccgacctagttggttgactgccttatccaaggtcgaattagtagctgatagcactttttgttgagcctgaaattggcgcccggtttccattaatgagaccatctcatcagcagtagaaacattagaattttcaagcattccagcttggaccggcaaatcaatttgctgggctccctgcccggtataaagcgttccgccgacattttgaagttgtgcatttgctgggaaagacaccaccatcaaattttgttgtgcttgctgggcatcaactgggccgccatttcgacctatcacttgaaaaccttcttcagtgatcagctgaccggcatcattcactgaaaaatgaccatcacgcgtatacgcgatttgaccatttcccattctaacggcaaaaaagccattgccttgaactgcaaaatccgttgccaagcctgtcggttcaagcgagcctttttgcatgtccagagcactgccctgaatttgattgccccatgtaaaaccgccaatctcatggcgggtttcatttttgggaccagcctggttattatgtaactgtgcctcgttcattgttgcttcaaacaaatttttttgcaggtagccaggtgtcttgatattagcgatgttaccgctaatattttcttgttgagcttgcaaaacattaaaactatgtcttaaagtatcaattcctctaatcatcattttcctccataaatccttttagttttccaactgcacgcccatggatctgtgaaacgcgtgcaatagaaacgtctaagaccaaactaatttctttaagtgtcatttcctgttcgtaatacaaactcaaaactaattgttctctttcagaaagcttgctgatcgccgctgccaactcctgtttcatttctgtttccaacaaatgttcttgtgcatcgcccgtttttttatcacgaaagatctcttgtctgctaggcgattgttctgctgaaaacaagacatcctccaaagagatactagccatataatgcaagctatcataaatatcgttcagctttttctgattgatttggagcttactgcataattctttgtcagtagcttctcgtttcaattcttgctctaattcctgcttagcccgataatagcgagtcaaattgtcaaatttataacgagacaaccgaccgtgactgcggatctcatcaatgatggtcccacggatccgtacataagcataactttcaaatggtactttcttttgtggatcaaatttcttaagtgcatcgatcaagccgatcactccagtattgaagagatcttcgtagtcataatcggagcttttaacagtgatccgagcgatgaccttttcaactaaaggcaaatatttgataacttgatcttccatattcatctcatacaagaaaaaagctcctttctgaaaataccgggtgaagtaattgtcttctatccttgttcctgcaaatatgtgttgcaaattggaatgtgacgcttactttggcatagtttgtctcacaaatcagaatgtaacgcgtactctggcatagtttgtgtcacaaatcataatgcaacgcatactctggcatagtttgtgtcataaatcataatgcaacgcatactctggcatagtttgtgtcacaaatcataatgcaacgcatactttggcgtagtttgtgtcgcaaatcgaaatgtgacgctttctctggcatagtttgtgccacaagtcagaatgtgatgcatactctggctatgtttttctcacaagtcagaatgtgatgcatactctggccagctatcttcaacacgccttcccacagagtgccttcctaaaattgcaactgcccgactgcctcgatcccgatttcatttgggatctcatttaacgacaaaattgccaaatctgggaagttaaacgacaacaactttctaaacgcagttctagtctgtggatttgtcaaaaggacaaaggaaatattttccaccagcattttttgattcagctgagtgatcgcatccaacatcttattgaccgtatccggctgcaaaacaggatacgaaccagttgctgtttttttaatactctgtgcaaccatttcttcaattttgggatgcacagtaacggcataaattttgttatcttcaccgacatacttgttggcaattgttcttcttaatgcttggcgaacgtattctgtcagcgtttcggtatctttggtgacggtcccataatctgccagagtttctaagatagttgataaatcattgatcggtaccttttcttccaacaaattctggaggaccttttcaacttctcctaagcgtaaaatatctgggatcaattcatcgatcacaacgttgctttgttgcttaatgccttccaataattgcttaacttcttggcgtcccaaaagttcaggagcatgtgagtaaataacttccttcaaatgagtggcgataacagtcaaaggttcgataactgtgaatccttgcaggtcagccgcttctttatcactttcattgatccacatcgcttctaaatgaaaggctggttccacggcttggatgccattaaacgggatctcatccccagtcggactaaagatcatgtatttatcaggataaatatcacccgtgccgacctcattgcccttgatcttgatagaataattatttgcatccaggtacaagttatctcggatcctcactggactgaccaagatccctaattcatgagcagtttgtttacgtaaagcaatgatccggctcatcaaactattgtcgatcgaactatcgaccagcggtatcagtgcataaccaatttcgatcgctaaagtttcgacttggaaatcggctacatcttcgtcttcttggacatcttttttcttttgtaaagccaaagtctgttttcgttgttgctcttccttaactttcttagcatcctgttgtttgatcaggaagctaacaccaagtagggctaaccccataaccataaagggaataaacggaaaaccggggacaagggataaaaccattaagatccccgctacgatccggaatatttgcggattgcgcaacgcatcttcagcaatatctttaccaaacgtactatcattatcagagcgagtaacaataatacctgaggcaattgagatcaatagtgaagggatcgaactgaccaagccatcaccgatcgacagcttgccaaactgtgataaagcttccattgcgctgagatcacctttcatagtaaagatgatcgttccaccaatcagattgactaaaacaatgacgatccccgcaatggcatcacctttaacgaacttgctggcaccatccatcgaaccataaaaatctgcttcacgttgcaggtcttcccgtcgttttctagcctgcttttcatcgatcaaacccgagttcagatccgaatcgatcgccatctgtttccctggcatagcatccaaggtgaaacgggccgacacttctgaaacacggccggaaccgttagtcacaacgaccaactgcacgatcatgatgatcacgaacaagatgatcccaacaatatagtttttccctgccataacgtcagcaaaggcggcaataacatgtcccccatcaccttgtgttaggatcgcacgagtcgatgacatgtttaaacctaacttgaacatcgttgtgatcaaaagtaaggttggaaaagtagtaaattccaagactgagtgagtaaacatggtgatcaataatatgttcatggcgatcgccatgttgatggttatcaaaaaatccaagactggcagcggaagcggaatgatgatcaaaccaatgatactgaccaccaaaagtgaaacgatcaggtcagctggtctgagtgcattcttcttagctgctttttgcttgtttttcatcagttactctctctcctatcaactcaaatccggttcaactttaaccagacttatattttatacttagcttcttcatccaaccggtagaccaaagcgatcaaatcagcgactggctcaaaaaactcttccggaatgaattctcctgcctcgatcttgagataaattgctcgtgccagcggtttattctcaatgatcggtacatcattttttctggcttcttctttcattttcatggcgacctcatcagctcctttagcaagcagctgtgggactggtgtttctgtcttatcatacttgattgccaacgctaaatgagtcgggttcgccaaaacgactgtcgcatctttaacttgggcgatcgagttccggaccatcgcctgatacttagctttccgctgcgctttgaccttcggatcgccttccatttgtttcatttcttctttgatctcttgtttagtcatcttcaatttcttagtccgactgaaactttgataggcaaaatctgccaaccccaaaaccaacaaaaccaaggcaatctgcatccctagttctttacaaaaattgagaataaaaaacaagatcttggcaggaccaacagaaccagcatttaaaatgtcacgtaacgtagatatgtatttgcgataacacagatatgcgatcagtaagaactttgccagcgtttttcccaggttgactatcgcatccagactaaacatccttttgaaaccacttaaagggttcaaacgtttgaaatcaggctttaatggtttagccgtaaataaaaaaccaatttgcacaaaattccccaaaaaactgatcaaataaccgacgaccaaaaatggtgctgccacgatcaaaaccgttaagatcgcctgcaagccaaccttaggtaggtctgcgtataagacctggtagttatccaactgctcgataaagcctgtcatataaggaaaaaacttgcctaatccaaattgccaagcaggaataaagataaacgaaaaggtcaataaagccaaagcagctgttaagtctggacttctagcaacatttcccttcttgcgcgcatctcttttacgcttaggggtcggtttttcagttttaccatctttatccatgaaataacctttcctttatcagactatgcctgacctaccgaacgcaggaactcgactagatactcatatgactgtgggattatctttcccaacaattccacgacatttggcagcatgatcaaaaagatgatcattcctacagtagatttaagagacaaacttaacatcagcacgttcatttgcggcacagaccgtgacaagatccccaatacaatatcgatcaccatcacagcaatgatcaaaggtgcagcaacattaaaagccatggcaagggtcttactagtcaaaatgaccacacccttaacacttgcattcgtcaaagtggcggttcctaaaggaacaatcgtaaaagatagcatcacagcgcgaaacaattccagatgcaaatttaacatgaagaaaactgccagtgccaaccagtagtacatccgaccaaattgtgaactggaaacttccattgtcctgtcataagcctggcccatcgaaaaaccattttgaaaatcgatcagggaacccgccatgatcacagcttgaaaaaccagttgactaacatagcccatggcaagccccaataaagtctcctttaaagccgccaaagcgaagataaccacactcatcgccttgaccttgccaactaaaggaatggcagcaactaccaaactccccccaacgatcagcttagcagtattaggaaaacttctttgtgataaaatcggcgctgtgaccataaaagaaaatatccggcaaatcaccaaactaactaattgtacttcggccactgacgtcacacccccgagatcaagcggaagatatattccgtgaattcttttagcgttgtgatcataaagtttccagccaagatcagggtcacaaaaattgcgaccaacttagggacaaaactcaaagtttgttcttgaatctgggtcgtagcttgaaagatactaatgaccaaaccaacgaccatcgcaactatcacgattggacctgaaactactaagattctgatcaccgcttcacgcatgaccatcaagactaatgaaacagacattaagctccccctctaactgaaactatgaactaacgattcgactaacaagtaccagccatctaccatcacgaataataataatttaaacggcaatgagatcataaccggcgacagcatgatcatccccatcgccatcagcacactcgagacgaccatatctatgatcaaaaacgggataaatatcaaaaagccaatactaaaggctgtccgcagctcactaataataaaagccggagtaagtgtcgttagcggaactgactccacatttttatagcgatgcttgtctttagaaacatctaagaacaatttgacatctttttttcgagtttcttttcccataaattccttaagcctgacctctgaacggttgaatgcttgtttttcagtgatctcctgccgactataaggttggatcgcttctttatagatatctgtataaacaggcttcatcgtaaacagggtcaaaaacaaagccaagccaagcaaaacttgatttggtgggttttgctgcgttcctaaggcacttctagtaaatgaaaggaccatgatgatccgtgtaaaagatgtcatcatgactaacaacagcgggaccacggataaaatcgtcatcatcacaaacacattaacgatctgcgacgaatttccgctctgtccactattgatcaaatcagtaatgccacgagaaacatcatcgaggccagctgcatgcactgaaactggtcggaacaagcaagccgttaaggacaacccgctcagtattttactttgctttttcgtagtcattacttctttctcttattctgcagcttgatcgtcttttgcttgagaatggccgcaaaatctattttttcactcgcttgatcatctgaactggtaaataattgctcaacctcttcttttgataactcagagatcaccgtactgccttgttctgccaagctcatcaagtaatagcgctcgatgacttgcacgatcccaagtgcggaagtttttgaaactgggattttcttgataactcgaaattgccgatcctgtggagcaacgaatttctgtaagtattttaaaaataagttgatcaaaacgatcacgataattaatccaaccaccattttgatcaacgacaacgttaactccatttgaatactcctcgtatgatttaacttattggatcacaaaatctgtcacataaacttcttgcactattgaactgccaaaatttttattaatagcctctttgacttgttctttgacctcatcgatactttgattatttttcaataaatctgcggccctttttggtttcaaaacacggatcatgctgtcacgcactaaaggcatgtctttttttaatgcttttgcttgatcatcgtcagccactaacaaagagacctttaagcgtaaatattgtggatcagctgcatcatccgttgccaaattaacaataaacattttgacgtttaccagacgctgtcttttagaaatggcagctcctgtttgcactttttcagctttaggttttgcgtcttgactattaaagtacttgccgaaaatgatcgtgccggcagcactagccccaaatgctaaaacgactactaaaacaataagcaatccccatttgatgccacctgctttagtttcagttgtttctacttcttcattcttcttcattgtttccctcgttattcccttcaaaaagattctcaccagaaaaaattcggtgacgatattctatgatcgcttccctaatttcaaacgctgtgtctctaactaccagcgttttcccatcgacaagcgtgattactgtatctggggtttcatcaattcgatagatcaaatctgggttcaaataaaattcttttcctttaaatgaagttaacaaaatcatgaacctgccccctattatttatcctgtacataaaataaaaattttaccttacaggttctttttccccttttgatcaaattgctgcgctcactattctaggacagctcctcaagccaggactttccgtctaaccaacttccacacacaatgctaaaaaacgcattatggcctagaagtccgttagtactcgagtcctacccggcttacctcgctcactatcttaggacagctcctcaacgcaggagtctgcgcctatctagtttaaacatcacggtgccaaaaacgcaccatgatgtctaaacccgatattgctcgtctcctaaccgcgttgtttcgctcactattctaggacagtttctcaacgcaggaatctgcgcctatccagtttaaacatcacggtgccaaaaacgcaccatgatgtctaaacccgatattgctcgtctcctaaccgcgttgtttcgctcactatctctttaggttgatcaattcttgcaacatctcgtctgacgttgtgatactccttgcattggcctgatatgctctgcttgtaacgatcatgtcagagaattcttgcgctaagtcaacgttagaatcttccaatgtccccgctaataaagtgttggtcccatctgtaccaggtactaaattattggcattaccagaatcctgtgatatttcataagtgctgttaccgatcttgcttaagccggctggattactgaacgtagcaatcgacactgtaccgatcacttcatcttccgcgccataacgcgcagtaactttgccatcaggaccgattgaaacgtgaccttcaactaacttttcaccagctgcattttgagctggtactgtaattggagttaacgctccgccttcctgtccgggagcatagcccatcacacgtaaaccatcagcattagtcaagttgccattagcatcgatcttcaaagcaccgttacgtgaataaacctgaccattattaccatctcgctcaaatactaaaaacccgctaccattgatatataagtccaaagcacggccagtcgtgttttgaataccttgacccatgtctgtatcgatcgcaccgacctgaaccccaagtccaacttgcttaccatcaataccgccaacggttgcacgtggtcctgaagcattcgcagttgtctgacttaaaatatctgaaaagttagcacggcttgacttgaagccgatcgtgttcgcattagcaatgttgttggaaataacatccaacctggtttgttgactcttcattcctgaaacacctgaatacaatgaacgtaacatttaaaattcctcctatttgtgtagcatctttttaaattttgctattttttaatcttttggttctctaacttctttgatggcacccatttcatattccgtaccgttgacggtcagcttggcaataccgccagtaaagttgactttatcaactcttccttgcttttcattgccttgttcatcaacaactgtgacattcttgcccattaaattgaaagcttgttgttgctgccctaaaagcaaagaattattcatcattgtcgacatattatttaattcctgtaaggtagcaaattgtgccatttgtgaaatatgatctgtaccactgctattggaatctccatctccggtcatggaagggttagacattgatgtcgctaagatcttcaaaaaatcatccattgaaagtcccaaagcatttttagcagcaccgttttgtgaagtactttttgttatctcactcgaactgccaagactgtttgcttgtacaccgcttaaattgtccatgaaatatattcctcctttgatcacgcatactctgagacgctcaaaccaacaaactgatcgttccgtgcttgatttgttcttcgcctggcaaatgttcttcactgaccacttgtgtcctcgtcttgtgcgaacgtgcaaatcggcgttgctgttcttgctcattttgcatgaaatcaccagctggaccatctcgctgctcgcctaaaagttcagaagtttccgccgtttgtctcacagtttcaacttgtttcaatgttttagtcgttggatcaagctgcagctgctccatgatctgctctaatttatgtgtgattttttgtaacatatcacgtgcagtactattttgaacttcaaattctaggctgactgcctgttcattcgtctttaccgcaactttcatctcacccagattagccggtttcaaattaaaaactatgctctgggtattgcccttactggataacaagcttttctcaactactggagtaagtgctttttgcaaatttctcacgacctgctcgaccggtctagttatcgttgttactttttgccccacattagcttgcgtaactgtcgcgcttttttgttcaactacgcttaccatacacgttctatctgtaagctcactaaaatctatgatttcagctgcttgtttttgtcctgctagcgaagctttcgtaccgatcaagatttttgaactaactgataaaatttccgctgactgttttagcgacgatactgaaagctcgtctgccatcgctgcaacttcaggtgatgttttaatttcttgtttacccagctgccctgctttagaaactaacgggctctcaatgatccttgtaggttgaaccgactcaacttccagatcagtctgctgagcagcttcctgcttgatctttgtgtccgaactcacaaccagatttattgtcgagttagattcttgaatagcctggctttcaccagctgacttagaagttaccatactaacaaagtttgctatctgttccttcaaggtcgcttgctgggttgcagacatttcatccaagtcaattacgctttgtgccggattttcgccaaattgctcggtttgttgtggtgcaacgtcattgtctgcaataatttcggctatcggtcctgccttggcttgctttaagtctagtggaggagcagcatccttaggtaatttttcattttttccggcgttatcattttcttggagcggttcgactgcttctgattggtcatgctcgatctctagtaaaatattttgctttttcaaatgatcgctactgctaactaattccttgagtccttccagcaaatcaggcgatatttggacttttccttgcttgaccaagtcatccaaagaaactgtaccgtttactaactgttggaacgttttcgagtcaatttgcaagacttgctctagctctttttttgtttgcgaatcagtagttttaatatgtttgttaagcatgtctttagaagtctctagtcgatttttagcctttttttgtctgaaacctttatcatcattaaccgcaatttccggcttatcttgtgctaaaaaagcctgaaatttccccgtttgttttttggttggcttggctttagcaacctgcaaaccagcaattttcttacctgtaactaccttttgcatttcattgtcctcctttcaaacccttgctttaacgtcaaggtcaagcgatatttacattttgttgtggccggtgaaaatcatccaactgcttttgttcctcatgggctagctccttttgatattgtgcaagctgctttgttttaagccgctctaatattttccgttgtttctgtgcttcgatcaattcactgcgaatttgctctttttgtgcttgcaaccccaacagttgatcgtgacaaatcatgatctggtcgttaagagcttgaatatagcgtcgtgtgacttgcattctgctaactgaaaattgtggagtttccatcatgctgtctttttcttgcatgacttgatccaattcagtatttttctcgttttccaggcggttgacttcagcaaaatgccccttgacctggtcttcaacttgcaaacgatattccagcactttttgtaatgaaaaattaaattcttccatccctgatctccctacccttctgcagtgatccgaccgtcacctaaaacattattcgaagcaaacaactgctgcaatctctcctctgtatctgtgaaacttgaaaattcatccacggcttgttgcaaaaagtcatcgatcggtttgtgcagctgcacagcatagtcgatcacaggatttgttccgctcttatatgccccgatatctatcaaatctttcgcatcagcgtatgttttcaaattttcacgcaattcactggcatggatattatgttcttgagagaccaacgatttcatcaaacgactgacactaggttgaacatcaactgccggataatgattttgggccgcaatttctcgcgataaaataatgtgcccgtctaagatcccgcgaactgcatcagcaatcggttcgttcatgtcgtcaccttcgaccaagaccgtataaaatgctgtgatcgaacccttgtcagacattccgcttctttccatcaacttgggtaattcggcaaaaaccgaaggagtataaccccgggtagttggcggttccccagttgatagaccaatttcacgttgagccatcgcaaaacgtgtgaccgaatccatcatcaaaacaacttttttgccctgatcacgaaaatactcagcaattgccgtggccgtatatgcacctttcagccgaactaagggcggcatatcagaagtagcacacactacgatcgacttagcataaccttcacccaagtctttttcgataaattctctcacctcacggccacgttcaccgatcaaaccgatcacgatcacatcggcctgacaatacttagcgatcatccccagcaaagtacttttaccgaccccactgccggcaaagatcccgactcgctgtccctcgccaaccgttaataatccatcgattgctcgaataccagtcggcatgattttttcaatgtcttgccgtttaaatggatctggggcttcctgcatcgctggatacccgaccatttcagactggtcaagcttggaacctttcaatggacgtcctaggccatcgaaagtatgtcccagcatttttggcccaaccttgacttcaagtgtcttgccagttgcagccactaggcaacccggcgcgatcccctctagctcatctaatggcatcaataagaccgtttgtttaacgaatccaacaacctccgtcactgtcttttttcccgcttttttcgcatagacctcacagacttcaccgacgaaggcttgcaaaccttcgactttgatcacaagaccaacaacttcgctgactttgccgtataccgaataaaaaggatattttttcgcttggtttaaataatttttaaaggggatctttatctttgtcatttatttacctcataattgttccagaaaaccttgtaattcctttttaatgtcaatatcaactaccgattcgtttgattcgacacgcagctgcaaagcatttaaactatcatcatcaaaaattatgtaacgcagatcaggaatttcttctttgacctgctctaacttagtggtcagtgattcatgataagcggagttagcccagaccatcaatacttcatttggtttttcgagttcgaataataatggactcaaaattgcagtgatcttttctggcgttagttccaactgcgtcttcaaaataatttcggccaactgtactgcaaaagaagtgatctcatcctgtttttctgccaggtactgttttgactctgccagactttgctccacgttatcttgtgcctgcttgactagaggtgccattttttgttgtccttttgtcacagcctcctggtatccatctttttttccctgagcataaccagaatcataggcttcttgcttgatttctgctgccttttgttttgcatctactaacatctcagctttcagctgttttagcttttgctggtaagctgccgtctgatgtgctaatttagcgtcaagagctgttaactgtggatcttgcttttttatttgaggaacaaaatctgctgtctttataccaactttcttaccatgcaggggcattgcctgctgtttcaaaatattattagacaatgctgtcttgacctcctcgaccaatatagatctcgcctctttcgtctaacttccgaataactgcgacaactttttgttgtgcttcttcgacagctgataatctagttggacccataaattcaagatcttctttgatattttcaaccgcatgttgtgacatattaccgaagataaagtctttgatacgatcatcgctgcctttcaaggccagctctaatacatcgtttgtcacatcacgtaatactttttgcacatccaacgcttgcaaagtagtaatatcttcgaaagtaaataggttggcctgaacttcactggccaattctggctgtctgctttccagaccggccaagatcgtcttttcagtactgcggcccgttgaattcaagatatcgaccaatgcgccgacaccaccgatactctcacgttcaccatcaaccacattggaaaacttatcttccataactttttcgatccgctgaatcgtttctggtgaagtggccgaaatcgttgccactcgttcagctacatcagattgcaattcatctggaaattctgacaaaacactggcagccttctcagcctgcatataacacaatatcaaagcaatagtttgtggatgttcttctactagcaaattaactaattgctgctcattagcacgacgggcaatgttaaacggttgttcccgcaactggatcgtgttcaaaacatccagaacttctttggctcgttgcggccctaacgaattaactaaaagatcctttgcgtagtcgatcccaccatccaaaacatattgtctggctgtggcagtgtcgacaaattcatcgatgacagcattcttttcttctggagtcacataatctgtattagctatttcataactgactttttgaatcatactgtcaggtaaaagtttcattacctgggaggacgcttctgaccctaaagagatcattaagatcgccgctttttttactccactcaattgagccatctcttatttcccctcctagtgatgatctttcatccaagctttcagcaattcagctgtaactgctggattagtctgggcataatctttagcctgtttatccttagcttgtctttctttgacttctggtttttcctgcagaggtactgctttttcctcttgttttgcttccggtaacggctcactattcgctgaagaagtaggtccaggttgtggtgaatcatcagttacatcgacatcataatcatcatcgtagtagtcatcatcgtcatcttggcgtttcttgcgaatgatcaaaaaggctgcgataccagcgattgcgatgacaccgatcggaagggcgatgtaccaccacggcacattattcttcaccgtcttagtcttatgaacttttggtgtcgtgtctggaacatctaaagcttgaacagtaactttatcaccacgatccttatcgtaaccgatggctgaacgcacaatacttttgatctgcgcctgctggtccccactaacatctccacgaatagcaacagaggtcgttaatctcttcacagttcccggtgcgctaacttgcttagtcacatcagtatctaattcattattgatcgtccggctatatgaagcgccattatcggtattatcgccagttacgttagagacattatcatcggtttgaccagtctgtgcttgttggatctgttcttggttcccattagcttgaacattttcactccgtaaatttggattgctatatttcgtagtcttgcgttccagtgcgtcaaaattaaggtcagcgttaactgcgacgctgattttgtttccatcagctaatgggcccaaaacacgtgtgatcttcttttcaagttgtttttcaaactgtttttggatctgcatatatttactgttcgcacctgtcagatcatcattgtcattattcccatcagccaatacatttccattactatcaacaactttaacgttttcggctgttaatcccttaacggcacctgtggtcaactcaacgatccctttaactgctgaatttgagatcgtgttgccattcaacgtcaatgcaaccgatgctttggctttttttcctttggcatcatcactaaagacatcatcatcaggcatcgttaacattactttagcttttttgacagcatttaaagaaccgatcgaacgttccagctcaccagtcgttgcccgctgatacatgatcttacggtcttcatcagtggtcatcatgctggtatcatcaaataactcatagccttgtgaactatcgggcagtttgttatcgacggccatatcgatccgatactggtcgacttttgtcttatcagctaagatcgttttaccatcatcttttaacttgtacttgatgtcttgatcttccaaatctttcgtaaccgtcccagcgtctgcgtcacttaaattcgaaaacaaaacggcatactcaactctggtgttcagataatatacgatcccaccagcagcaagtatgctgatcaaaccagctatgatagcaatttttactaaacgatttagattagaccatttgtcttttaagtttccaaaaaagtcctttactttatccacttccaagcccccactacacgactaaaactgcatgttcttaagatcgttataagcttccaaagctttattacgaacttgaactgcagtctgtaaagttaattgactttcagtcatattgatcatgacctgccctaagtcatcttgttttccactgatcatatcggtagtcgactgatccataactttcatgcttgaatttaaaccggataaagcatgatccaaataatcaccgaatgttttaccggcgcctttaactgtctgatcagaattatcgagtccagtaactttgcgcagttgagtagcataattatttaagccgttaataccattgacctgtgccattttatctctcctaattttctgatatttctagtgccttactcaagatctgcttattgacctgactcgaagcaacatttgcttcgtaagatctttgcgattggatcaagtcgatcatctcatccgccaagttaacattcggtaaatgaacataaccattttggtcggcatcggggtcatctggtttataactcaacttctcagtttgatcctgtgcaatgccagtcactcttacaccggaactctgtcgtttgttggcttccatgatatttccattgtctgcttcgacttgacgtaaattttcagcgaattgaactgacttccggcggtacgggccaccttccggcgttcgtgttgtattgacgtttgcaatattagttgatgtcgtatcaagctttaaccgctctaaggctaagccgctggcattgatctgcaatccattaaaaatactcactctgatctcctcttctccaatttagtcttaccattaatgattcaaaacataactcatcatttggtaacgccctttgagttgtgatgtcaacgcgctataattcaaaccattttgtgcctgatttaacatctcaacatctaaatcaacgttattgccattttctttaacagccgtatcattgcgcacgctttcatgcggttcaattgccccgcctgcttgcatatgcattttagatgtagtttttaggtgtgtttcttggtccaaagcattattcaaaacactttcaaactcgattcgtttagctttgaaacccggcgtattgacattagcaatattatttgcgttcaattgtgctctattagaagaaacgtttaaagcttctttcattaagccatatgtattttccaaaattaattacacctattttctttgatttaacactaatattttcaaactttttatatttcaattttcatagtagttgcttgcagccaagatgtcccctttatcaaactttttctatatttttcacagcattataattttagctattaacatactcacaatcaagttaatttttaagttattttcaattattttattaattatttttttaactcgtcgtttgtaaaattaagttagaaataaaaaagccatttgtggtagacttttgaatatccctaatcaaaagagaggtaaccacaaatgacttataaacatcttaccacatgtgaattaacctttatatataacttttggaaataagatattaaagcctatcatgccgctaaagctcttaaacgttccagcgaaaccgtttatcgtgtttaccggtttctagatgctggtaattcaattagtcaatttcaagaaaatcatcgagttaataaaactcattgcggtcgaaaagcaattgaattaccagaagatgaaaccaaatacattaagcagaaactcgcattaggttggacccctgatacgattattgttcgagctgagatacagatcagttgtagtatgagaaccttataccgactttttcaaagaggtgttttcaatgtgaaattgttgccaatgaaaggtaaaaggcatccaaatggttacgttgaacggcgtggtaaagctggccgactcggcagaagtatttatcaacgctatcaggattatcctcattttcaacatgaatttggtcatttagaagcagacaccgtccaaagcaaagcacatcaaggtgcagttatgaccttagttgagcgtctctccaaagttgaaatcattttaaacatccaacaaaaatcggctgaatgcgttaataaacatcttaatcaatggttgtcccaacagccaaaacaccttttcaagtcaattacttttgataatggtaaagaattcactggttggaaagaaatcgcaaataagcatgatattagtacttattttgccgaagttggggctcctaaccagcgtggcttaaacgaaaataataatggactaattagacgagatggtctcaacaagagcatggattttcgcaatttaccaaatgctttagttcaacaagtcagtagccggcgtaatcgtattccaagaaaatcattaaattataaaacaccaattgaggtattcatggaaaacatcacagataaacagctatgttatttctaacttaatttgacatttcaagagactaaaaaaggcgaactatcgcatttatgtatgccatttctgaaccacaaaaattttgaaagcgccttgattgctaatttatatataaatttaaagaatgtctaataaatttgcttgttaatatacaaatttaaaaattagtcatttttttggcattttttacttatattatatttcaaaaattattcttgttgaaataatttttgcgaagaaaatgagattttcttactgaataaccgaattacccacccaattttcatttttcgctattccatattgaaaatgtacttcaactattttcaataataatttgctcagtttatttttttatcactagttccactctcctatttttagcacgccccgctgatgtatcgttagttgctttggggttattttcaccaaaagcttcaattgagacgttgccttccgtcactgccttttgctgcacgaagaaccgcatgactgaaactgctcgagcagcactcaattcccagttacttggatagtctttcgattcttgtggcacattatctgtataaccagcaataatgacctcattttcttttagttgttgaatttttggccccagttcctttaaagctgcagcagaatcggcagtcagatccgcactaccgctgtcaaataaaatattgctatccaaatttaaatgtagtccgtcagacttgagtgaagcttttgtgttttttcccaagttcatctctgcagcagtttcgtttaaactatgagcaatttcttttaattgctgttcttgattctgttgtgaaatactgccctttactccattttcttgtttgatcgctgcttttttagttttagggtccggtgcctgactatctttttctttattagttactgatggtgaatcaagttcgattgcgtttgatccaccgactgccgcacttttatgattttgttgctctggtgacaaagccatgatcgacccaaactctgaactgattttttggaacttactatcatcgaccttggctgaagcaaacatcacaataaacagggcaagtagcaatgttaacatgtcagaataagggagcatccaggcttcactatcactatcattttttttctttttcttacgcatgcctgtcccactttctttccaatctactcatttttttcaatgtcagttcgtctggtttcactgatcatactttcaaggttcttttccattgttttcgctgaaactccttcttcgatcgccaatgtccctgccatgatcagttctaaattttgaatttcttgttctgatttacgttgcagtcttttagcaaaaggcatgaacactaagtatcccataaaaataccaaataacgtcgcaacaaaggccgatgagatcgactctcccaagacaccaacgttatctaagtgtccaagtgcaccgatcaagccgatcacggcacccatcacaccaagtgtgggtgaagtactgccggcagtttgcatcatggcagttcctttagcatgccgttcctcgatcgatgagatctcattttccatgatttcttcgatttcttctttatcgatcccgtcgaccaccatctccatgccgcgttttaaaaacgcatctttttctggatctaagttgttaacaggcgtttccaaggccaacaagccttcacgcctggcaacatttgataattctactaatttatcgatcgttgcgcggtaatcatacttttttgcttgaaataatactttgaaaattcctggtaaacgtttgatgtcagccagcggatatgtattgatcagcgctacaatgatccccccaaaaataatcatcatggcctcggggctaaataacatggctaagctagcaccttttaaaatcatcgctgccaccacgatgaccaacgcggcacagataccgatcagtaaaaacaggtccattttttctcctcctcttcactcttccattttatttatcggacaaaattgaaaagatttaaggaaactcattaaaaaaatttccaaaaaaataaaacgactacagaattaacaagcctgtagtcgtttcaactaaatattttgtttttggctaacttcattccaagtttccaataattcttctaacaatttaacaatgggcggcagcttttccttgtctttgctgacattagcggccactaattgttgcgtgataaagttatataaacgatttaagtctgtcgtaatttgactatcaaccgaatgatctaatgaaaatttcagctcatcaacaatgtcttgagctctaagcaattcatgatttgcctttaccatatcattttgattcaatgcaatttcagctaacttgattgctttgatgcccccagagatcaataaactgatcagcttgttaggcgaagcggtcaacacttgattcttcaaataaaaattacgttgcttttgtgcctgttttacatccatttattcaattcccccgccatcaatttaactattttgtaattccagcttgaagtcacggatcaatattctaattcgatcatcgtcccatcggtaattttttggtggtaagtcccacccctggaagacttttgacgatctaaactctttaattgctgcaacacttttttcttctctttcgccgttacttgcatcagactctgatattcagacattacttgttgtaaaaccactttttgctgcgctgacaagtttgactcagtttcctgcaattgagtcaataattgatcattggcttgtagtaaagctagaatggaagcagttgtttggtcccagtctttcatattttgctttaacttcgttaatatttgttcaacttctcgtttttccaaacttctgctcctcttttatgatcgttattattgttgatctacacccaactggctttgcatgtattgcatttgtgaatcagcttgcatcatgatcgagtctaactgggtaaactgtgcaatatattgttcccgtttatcggccaaacgcgcggtgaagtcatcgatctgcgagttcaagtctttgaccatcttatcaatgctatcgcttttattagtaatgattccctttttagtagcatcgttgctaataaattcattgaccaaactatttaatttagcagtatagcccgtgtccgtactttcgtcgaagctgtcctcaccttgaacatagaaaaagtcatggactttttccggtgaatcagcaagttgtgacttaaacttgtcttcatcaaggctcaaaacaccatccttgtcaacagaaaagcccatatcgaagggactcagactagcgccattgtctttatcggcttgtgtgatcatatttctcaaagatgactgtagccgttgcagagtcgaatcgccaaccagcttaccttgaacattagtcgaagaactttccgctgtggaagctgacggattgcccacatccaggtcacttttgatcaaactcattaagttattgtattgtgttacaaaatcagtagcggccttgactgtttttgaatcatcattcttcaaggataaagtgacggcatcttcaggcttgatctcttttttcaaggtgatcgtcgcaccatcgatcgcatcagagatcacgttactatcactttccatgtcaatgccgtctaggctatacttggcagcctgacccagatcagctgaagtatttaaccctaaggcagctaaagtagctgtattctttgtttgatccagtgttgtttctttggcacctgatttgttattcgtcaaaactaggcgcttgttgatcactactgccgaaacaccaatattttttgattctttattgatcttatcagcaatatcgagtagtgagtccttctctgtgatatcaatatcaacagtttctgggctatcgtcagttttttctccttgataagcaaaagtcagtttaccgttcaagttaagatcagtgctattcgtctctgctgcgctgacctggctaccagtcaacttagtttgcttagctaattgactgaccaacaactcaaaatcgccaccatttttggcgtcagaatttcctgagatcgttgctaggtcttcattcgaacttttagcaattttagaataataactgtcattattctgcaaggctttaagcttagtttgaaaattacttaaagctgatgaaatttcactccaggcagacttttcctggttatattttgtaaccttattttgtaacagcgttttaccgccagattcagcctcaatcaactgatcaacaacatccgttgtgatcccagagtactggcccaaaaagctgagccctgcattgggtgctgaggtagcacttgtaatatcagccatttacgtcactatcctttcttatcgaccgcaattcccatctgatcccagatttttcccaaaacatcaagcattttatgagaagggatctcctttaacactttgccgctttgcatatccaccatttcaacgtactgccgtccagtccgctgatgaatttcgaatttcattttaaaatcgcgacccagtaactttttattcaatgtatcaactgctttttgcagttcttgcgggtctacgactacattatcggctgaatcctcaacttctttaacgtttttaccatcatttaactgaaaaagtttacccaaatatttttcctgatctttacgaatgaatgattcatccattaatgaagtatccatttcataactatcagtcgcaactttctggattttattaatagccggcgtggggtcgactggtggaatattattgatctgcatgttacctgtcccttctttccgtgtcttacatatattcactccaatatttctagttaaattctcttttgatttagtcaggctgcgcgagtcaacttctttcggcttatctaagcaacagacttcgatgataagaacgtttcgaaatcagctgttccgacaatgcttggaagtccccgatatgccttcaccttgtttttagtcaggttacgaaatgcaaaagcttgcgcttaactaacttcaacaacaagtcgctaaagacatgacttattgttaaagtcccttaatgctcggcttcataccgcattttctccaccttgtttttcttagtcaggttacgtgagacagaaagctctgcctatccaaccttagcttcacatcgcaaaatacgtgatttgaagctaaggtccgatagtgctcactttctcccgtctcactccaccttgttattaaaaaaaccgaccgccgaataaacgacgatcggcctgtgccaataatattttgttagccctgaagtaatgacaagacactgtttggcattgcgttagcctgtgccaacattgatgttgcggcttgtgaaagaatattggacttcgtaaagttcatcatttcttctgccatatcaacgtcttcgatccgtgagttagcttcagaaagattttctgttgttgttcccaggttgttaattgtatggttcaatccattttgtgcggcacccagatcagcacgttgtcctgaaactgtttcgatagcagctttgatatgcgcaattgagtctctagcattggtagcattactcaagtcaacacctttacctggaacagctggaattatatgtccaggatctgtatcattttcaggtgttccaggagtcaaatcatcaccaacgcccaaagcatcagcatccattttcccaattttgacttcagcagtttggtctttacttgcaccaacttggaaagtaaatttttgattatcattattcaacaacttctgggtgttaaattccgtgttgttagaaatatcagtaatgttctttttcaaagcggtaacttctttagtgatcttaccacgatcttcgttagtcaaagtatcgttagatgcttgcactgccaaatcattcatccggctcaaaatgctatgagtttcactcaaagctccttcagctgtttggatcaaagaaataccatcttgagcattacgtttagcctgcttcaaaccaccgatctgtgctttcattttttctgaaatagccaaacctgcagcatcgtcgccagctttgttgatccgcttgccggatgaaagttttgccaaagaatcactctttgatgcattggctgcagataaacgtgaatatgtgttcaatgcagctacgttagtattaattctcattgtttgttcccccgaatattttgtattttgttgcttacacttattactatcggaatttattttaaatgtttaagtatgaaattaaacataattttgtttttttgtttaaaaaactgtccactccatacaagaagggacagctaaggtcaacctgtttatctagacagacttacattacaattcaaattattagccttgaagtaatgacaagacactgtttggcattgcattagcctgtgccaacattgatgttgcggcttgtgaaagaatattggacttcgtaaagttcatcatttcttctgccatatcaacgtcttcgatccgtgagttagcttcagaaagattttctgttgttgtacccaggttgttaattgtatggttcaatccattttgtgcggcacccagatcagcacgttgtcctgaaactgtttcgatagcagctttgatatgcgcaattgagtctctagcattggcagcagtactcaagtcaacgcccttgcctggatcttctttcgtaccagccccagcatcccaaacatcaccaacttctaatgtctcagcatccattttcccaattttgacttcagcagtttggtctttacttgcaccaacttggaaagtaaatgtttgattatccttattcaacaacttctgggtgttaaattccgtgttgttagaaatatcagtaatgttctttttcaaagcggtaacttctttagtgatcttaccacgatcttcgtcagtcaaagtatcgttagatgcttgcactgccaaatcattcatccggctcaaaatgctatgagtttcactcaaagctccttcagctgtttggatcaaagaaataccatcttgagcattacgtttagcctgcttcaaaccaccgatctgtgctttcattttttctgaaatagccaaacctgcagcatcgtcgccagctttgttgatccgcttgccggatgaaagttttgccaaagaatcactctttgatgcattggctgcagataaacgtgaatatgtgttcaatgcagctacgttagtattaattctcattgtttgttcccccgaatattttgtattttgttgcttacaaatatatatatcggttcagttttaaattgtttaagtcattttagaaacttttttagaaaaacgagttttaatctcagatacccattttcagcgaaaaaaagagccacatcttttatgatgtgactccgttcttgctatgaaatcaattggttctataatatttggtactgatagataaaaacttctatcagtaccaattttgttttatgataaaaaaatagagatgaagtccgcacttcatctccgaaaaacaatccctacactgaaaggaatgtcctacatggcgaattgtacactagatcttctcggaattaaagactcacgtttgcggtttgatcccaaatataaaaatgaggcaacaacttatgatttttacaaacaccaaaaagtgcgttttattcatctgctgcaatcttattcttgttcttgccccgtttgttgcaaaaaaatgaaacgtaacggctttaaaaccgttaaaatgattggcttaccttcaggtggtctgaccaatattttctcgatccgtaaacaaaaatatctatgcccgagttcaggtacatgtcctcaaactatcacaaaattagcggagatcaaggatgtcagagccaacaatcaaatctcacaagccgttaaataccaagcagtttctaaattaggtcagaatatctcacaaaaagacattgccgctgacttcggcatttctggcatgaccgtgatgcgctttgcgcaagaagtctctacttacttagaaccaaattatcattatttgccgcaaaatatcgcttttgatgattttaaatcaggcaatttttctgcaagcggcatgagtatcattgttatggatattgcgactcaccgcactttagacattgtcaggtcacggcagaatacatatttgcgcagctattttctgcaatatgaccgtcaagctcgttgggctgttcagactgttacagttgatctttatgcgccataccgttcttttattcatgaaacttttcccaatgcgatcattattgccgaccgtttccacgtcataactcaggcctatcgtgccttgaatcaagttcggatccaagctatgaaacaaggcggacacggttcacacgtttcccgtgctctgaaacattattggaagctcttgaccaaagacgccgcgcgtctcgattttaaacactatcacaaaagcagaaattttcgaaacagccagttgtgtgaacaagatatcgtggcacgtttattagacatgtctgccgacttgcgtttagcttacaattactatcaaacacttttacaagccatgcatcaagcgaatccagaactgttagaggaactgacccaatcagctgcgggaatgcctgcacccattaagcagaccaaccggactttacgtaagcatctgcaggagatcaaaaacagttttgaaagtgccttttccaatggaccagtcgaagggaccaataacaaaataaaaaccattaagaaaactgcctatggcttcagaaactttgcgaatttccgtctgcgtgttctagtggaattaaagaatagttacgtgagtttgaactttaataatcagataaaaaaagccgcccgttccattcaggaacaagcagcttaaacaagctagaccaattacttttcaattttaataatttatttcatcagtaccacttgataaagaaccaatcaatttaataccagtgattcttgacccaatgtttctgtgcgttagtccagctgccgtatctttgttggacatattgagccgcaactttttcttgattggcaggtgaaaaatcaccatgcaaataattttgatccagctgatatttgccaatatagcgtccatttcgagcattatagttattgctcgactcatgctgaataatataatcacgtgcacttttttctgccccagccaatgttggctctaaactgttgctagaactggcagaagcgttctcatcaaggtcaacattcgctagtgacgctactgttccagcatcattgaccatagaggtcggttgcgcagccgcacttatttgtgctcttccaggaatagttaagttctgtccggctagaataaaatccggatcgtttaactggttagcctgagcaacagcttgtgtagtggtgtgatatttctctgccaactcagagacagtatcgccctttttgattttgatcgtttgttgtgctgtttctaaagcattcgaaaactcagctgcttgctgcgaattagtcgcctgtgttgcggcttgcatcgacccattattatgaacttgcaggtcattattaactaaattcatttttaaaacccgtttccttctttaattactatcacgattcctaattatatagtgttttaaaatattttacagtatctttttaatatcgatcgaattaatttgcttttcccagcaattatattgaataggaggtattattttgtccccaaatcaagccttttttctcactgttattggttgcctgttagctatcagttcatcttattttatcgtgcgtctcaatatgctaaagccaacactcaagcaaaatttcttggaccaatatcctgacacggatgaccaagcttacaaagcgcaacaatcaatgaaacaagcttatttcaacgcatccttttacaagcaagctgttcctttaacatcttggttagtccttttattctttttatcaatcggtggctgtctaacagcgctctatctagatgccctgaacattgcaatccgtcttttggggagtgcattcatttttatcgcgtttctctaccttaagttgccgacttttcaagcacagcatactttttggaaatcttatctacaagcgcatcctgaaaatgaattaaaagtcgtcatactcccactcgattcacccattcaacagcggcggattgccttactcaccaaatttaaatgttgtactcttgtagcaggtctcatattgttttacgcctctctttttctataactcaaaaagcggcaccaaccattttatggttggtgccgcttttttaattaacgaatttcaattgggttcgttggttggtctgattcacttaacttcggtagcatcaattgtaagacgccatcttgatattgcgcatcgatttgatcccggttgacaccaggtaggtagaattgccggctaaagcgcccataatgccgttcgctttgaacgatattgccttgactgtcactatgatcagcgaaactatcacgtttagcactaatcttcaatgtattatcttgataatccacgtgaatatctttcttgtccagtcctggtaaatcaaccgctaattggtaatccttatcggtctctttaacatctgttttgagtaagttgtccgtttcaggcgatattgccaataattgctgaccgaaattcttgaaccaatcatctccaccaaaattatctagccaattttgacgaccattcattaattcgtttgccatctctaaaacttcctttcttaatctttacaactctattctagtccgttaattatgaaatgcaagtaattagcactcgacgttgttgagtgccaatttttaaactagaccactgatttttcagctttttgatacccgcctaatatggttttgtgctatacttaaggttccaaaaatattcggaggtaggttcatatgaaaattgttgtcttagcgggcgggcgtagtaccgaacgtaacgtttcattaacgtctggacacaaaattaccaatgcattacaaacgaaaggccatgacgttgctttcgttgatcttttcttaggaaatgatttgcacgacgtcgcatcaatcgatgatctttattcttcaacacctgttgaaaaagattacgacatcagcgacgaagttttaacagacgacgccatcaacgcattacgtactgatggttcaacacaactctttggcccgaatgtcttagagatttgtaaaactgctgatattgtcttcctcgcacttcatggtggcgatggcgaagacggtaaagtccaagcggttctcgatctctttggaattccttataccggtagtgacacactcgcagcaggtattacaatgagtaaaaaggtttcaaaggaaatcttattatataaccaaattccaactgctcggtttgtcgctgcttatcgcgaccaacccatgccagaaatcccatttgagtaccctgtcgtggtaaaaccaagtaacggtggctcaagtgttgggacgcatatcgtgcacaacgaagctgagttacaaccagctgtcgaagatgcacttcgtttcgaccgcgaggctttaatcgaagaattcattaaaggtcgcgaattctcacttggcgtgattaatggtcaaccattacctgccattgaaatcgtcgttaatgacggttggtatgactttgagcacaaattcgtgactggaaataccactcaatttgtcacaccaccaaacgatttacctgatgatgtgcacgaagccatgaaacaaatggcacttgatgctatgcaagcacttggcttaacgaactacgcccgcatcgacttcttctggagtcctgaaaatggcttacacgtgatcgaaggaaatacattacctgggatgacgccactttcattaattccacaagaagcagaagtgcttggtatcagttatcctgatctttgcgaaatgattgttcaaggtaaattagaactccttaaagcaaaatagccaataaaaataaccctgtcgacgattttcagtcgacagggttatttttatttggttcatttaaaactgattacttagttcctgattaggaactattcttaaaaaaacacgtcgattggaattcccaagcggtcatgtagtaattgaatttctttgacggtaaatggaatcttccctctaatcttacgattagccgtcgttaatgttttgcccaatacatcagcaacaacttgctgtttcaaatcatgaccctttaaataacctgatagaacaaataatttttctgccacattcagcacccccaagaaacgttatcaatcccgttccacattaggaatattacgataatgtaagaactctgtcaattaaaaactttagtcccaagtgttcacttattgacgtcatttgtcatataattaaacttataagtcaaacgcgtgataaaggacggtgctaaatgttcggacaattattacacgataagcgaactgctaagaatctaacaatgcaacagctcgccgatctactcagcgcaaaatataataccaagattagtagctcaatgatcttccggtgggaaaaaggcgctgccccatcactaaaagcattatttattgttgctgtcgaattgcaaatcgaccttaaccaattggccacccttgttgcggattctaaccgcgtcaattagccgcttttttttgtttttttcccgatttttgaatggtcttcacacctagtacatctaaaaagaacgtaaagattggtaatccaacaattaacccccaagttcctaagaaacgttctgctacaaataaaacaacaaatgtaaagaaaattggcagctgtgttttactcgacataaatcgcggattcaaaacatatgcttctagggcatgaatgactaaaatcatcaccaatatataaaccacatactgaattccgccgactgaaaaggcgataatgcacaatgggatacatgaaacgatgactcctgcgaccggtaccatcgacaataggaaaatcatgatggctaaactcggaatattaggcattttcattaccgttaacgtaatcgttgttaacactgtattcacaattgcaatgaagatttgggcttcaattaccacgccaaaggtattcacgaattttttagcaaaatacatgatatcttggaagaaccagccgtaagtactcttcaaaaagagttttccaaactgcggtaatcggtctagctcaattgtgtaaaagaaactcaaaataaacgataagacaattgtgacgcccattgttccgattccggtgatgtaattaacgattgttgatacaccgtgtttcaactgatccgtcaagttgaactgtttcatgtaatccccaatggttcgcataaattgattcgcatcaaatgatggactttggtagaaattatagacactctcgcctaatttaattgactgtttagcaatctgtggcacataaatcgttactgctagatacactaaaaaaatcaccaacatataaagcggcacaaccacagctgcgggcggaatttttgaatactgttggacctttcgtactaattgagtcactaaaaaagtaaagatgaacgtcagcaaaatgatattcatcatcgagcgtgacacatagatgaccccaatcaacgttaagagcactacaactcgtcttaactgctgattcgtcacaaatttttgatataaactcacgcaatttcctcctatggcaattctatatcattattttacaacacttcgaactaattggatattctggaattccgatagttgcaacttacatctttttaaaaatagtcgtatactactctggtacttcaaatttacacctagaaaggattttcggtatgttagaaaaaactttttataagaaactactacaacactcttttgatttccctgttaccgtcaactattgggacggcagctccgaaacctatggttctggagagcctgaagtagcgattacttttaaaaaagcgattcccatcaaacaattgtccagcaacgcatcattagccctcggcgaagcgtacatggctggcgaccttgaagtgacaagtaatacaacagataccccacttcaaaaactattaacggcggcttacactagcgcagacagtttcatgcgtaatagtcgctacattcatctgattccaaaacaatcgcattcagaaaaggcaagtaaaaaagatatccaaagtcattacgatttagggaatgacttctaccaactttggttggataaaacaatgacttactcatgtgcttattttgaaaaaccaactgatgatttagagacagcacaaattaataaagtgcaccatattttacgcaagctcaatccacaacctaaccgaacattgctcgacatcggctgtggttggggcaccctcatgttaaccgccgctaaagaatatcatctcaaagtggtcgggattaccttgagtcaggaacaatatgatttcgttcaacaacggattaatgacgagggccttagcgatgttgctagcgtccaacttgttgactatcgcgaactcaaacacgccccattcgattacattaccagtgttgggatgtttgaacacgttggtgaagaaaatcttggtgcctacttccaagatatcgctgactacctcactgatgatggggttgccctccttcatgggattacccgtcaacaaggcggtgcgcgcaatgcctggattaataagtatattttcccaggtggctatgtacccggtttagttgaaaatacacaacacattatcaatgccggactacaaattgccgacatggaacccctccggcgccattatcaaaaaacgctggaaatctggactgctaattttaacgcccaaaaagacgtcattttaccaaaagcaggtccagaattcgtccgcatgtgggatctctatctccaagcatgtgcctcatcgtttgaatctgggaacattgatgtcattcaatacctcgtatcaaaaggccccagcgcaagagacctcccaatgacaagagaatatatgtatgattagagtgctgactgtcgcgcttagtcattgagcattaattcaaaaataacataaatccaggttttaggatttatgttatttttagattaagcggaaattactgcgacaggaagcacgtttagagtgctgagtcgaacgggttggctttgaggattacccaaaaaagacccgctaatcaacaatgattagcgggtctttttttattgccttattttaaaagcgcttctgccttttctctaacttccgcgtcgctcatcttaagatagggtttcattgcctcaacggttttatccgtgttccggccgttggcttccatatagtgatcccacaaagcatcacggacgattgtgttatcgtcactccaatcaaatgcttctgacatcttcatatctaaaaccaatgttttttcaacagctgctgccatattaaaaacctcccatttcttttttacaactctaatgataaacctcttttgaaaaagtgtaccaaaatacgcacttttattttttagagtcctgttagtaggtttaaaatcacgatttggctaatgccaattgccaagacaacatgggttaagatttcaaataataaaatagcatagacgcgatcaaaagctgcccatcgagtttgaaataaactaatcccaaccgcaatgttcaaactgacgtacatcactgcaaccatgattaagacgaaccagatggcggtcatcccgaaacatagagcagccaacagcgcagctaatgctaaaataacggttatcccactgtacgcactaatctccgttagatacgcgcgcaaggtggttgtcgtcttcttcaataagtaacgcttgagtaaaaatccgattcccaaaacaaccaccagaataaatagttgtccaccgagtgccttcatatcaagcggtaataagtttagccgttggcgcaagacaatttgtgacgccatcaccccagcaaccgcaccaatttgttctgaccaactggcaatgagcaaacttgccgttgcagtattcattaatataaccagaccaaacgtgactaagccaaaccacaggttggcccactgccattgcacctttagcggttgttttaaactccgcgctaaaaattgatagtattgttgcaggagcgatgtttgctgttttgtttgcgttgattggtgcactagaccgcaattgggacattggtgcaatttacgcccatatttaatatggcattgtgtacattctatcattcgtctgatctccaaatacttaatttaccgtacaactgtgactgaacatggcgcgtatttcgctaaatagctcgcatgtgtcccgattaaatgtttagatggtttcgtctttgaaccacagatgaccaagtctggttggaaactaggaatcacttcttcaacaatcacgtgtcctggattaccttcatttaaaatcggcgtcacatcttcaaccccgaattctttcgctttttgaacataaacatctagatcggctgcgatttcttctcggcgcccttcaaccacgtttggtgagagtgattgataaatgttcaaatcgccggtttccaaaatgctgacaatccctaatggaatttgataggccttagcaagcgtacaagcatagttaaaggcccgtttggatgaggttgtgtcatcatcatcgatagcaattaataatttttgatagtgcattgattcaacttcgatatttaattggcgtttttctgtcattagttaagactcctcgtttatttaatcaataatgcttctttggcatgaattaatcccgtgattaattggttgactggggtcgcaatgtgcttttcggcgcctttgcgtgccacgtaaccatttaagtaatccacttcggttaagcggtgatgttgcactaaatcctggtgcattgaaggataatgaccacctgcttgttctggtgcaaacatcttgctgatgtgggcaatcgtcgtgggaatgtctaattcaacggcttctgttgcagcaaccgctgagaattccgccacaattgaacgcaagagttgttgcgcttgtggggtttggcccaattgtgcaatattacagtctaacaaggcacacaagctgttcagtgtcccattaacgcaggctttacgccagattgaaaagagtacatctgaactatattgcgcatttaagccagccgcactcaacaaggcaactaatgcttgtgccgattctttgccatctggatcaacattttgtaattcgacattcccagagcctgttaatgtaatcgcacctggtcccgttaaccccgccgtccaaagtgtaatgccgacaaaaatattttctttgggcaggtattgttcaatcgtttcgggatgcccgagaccgttcaataaacagactacttttgtcttagcaccgattaagggtttgatggcttgtaacatgtcgactagctgcatcgattttgtgaataaaataatgacgtcttgaacttctttaatatccgttggcaaagcagccggaattcgaacctgaacgggttcgtgccccgcttctacaaccgtcaggccattggtattgattgcttgaacgtgttctgcccaattatcaagtaacacaacatcatttccagctgattgtaacatgtaaccaaaacgactgcccattgcgcctgagccagcgattgcaatttttgtcatagattataaaagctccttttatgatttgaattctttttaatcatgccacatttttaagattttttcacccgtaaccgcttaattcaacttaaaaagaagctgtcaaaccgcttatagcagcctgtcagcttcttaaaataggaatttacgccttcttaaaattaattgatcaatcaataataagaccaagctataaccaagactcattgcccatgataataaaatatcaactagcgaaatgtgtcccaacgtgttgaagagttgcgccatggtcgaaacgggtggcaaaatccccagaatatagaggtagggatgccagtaattgacaatcgcttcacctaaactgccgagaaccaccatcaagatggtcaacgtaccggccatccggcgattcactaaaattcgccgttgccagaacaaaccggtcattactgaaacaggtaaaatactcgtcaacattaaggtcccgcctagccaatcccaccagctaagtcctcgaccaaaagcgtggtgcccattgagcacgtaagtaattgccaagcttcccatcccaattaggacaaagaataatcccaacaagatgagatagctaattaaactgagataaaaacggcattgcttctttaattttaaaattaaaagtttttccatttgaaggggaaattgattgatgtaactgtaggtcaaccacgtcaataagataaacagtgtcattaataatgtagcgaggctgccgacgaaatcttgtggttgcaccgcataattgactaataaggccactatccaaaatagcaaaggcccccacaaattcccattatcaaaaaccattttctgatgcaaacgtaactgtgcactaaaggacttcataacgtaacccccttaggctaaagccactttttaacattgcttgaattaattcatcactatttttgatatttgcatacaagacgacgtaccgcgtaccatcaacaatttttaaagctaactgttgtaaagtagcgggaagtgcgagtgatcgcggtgtagttgcaaattctaaccgcatcaccttttcttccggctgcggtaattcttcaatcggcaatagccgcatcgcatctagttcataaatttcagtagccaactgttcgattaaaaaagcgttgttagtgccgacaatgatggcgccccctttttggcggtagtctttcaaccaatgaatcatccgcatctgggtcgttccatcttgaccagccaacggttcatctagcaataaaatatctggggtccgcaaaatcgcctgcacaaagttcactttttgcagactaccgcgtgacaattgatttaacggtgtattaagtgccgccgctaacccaaattcataggctaattcattaatctgaccttctaaatttcgattgctaaactgatctaattctcctagcatccgcaaataagtcttaggtgtcagtccatttggtgcgagttgttcagccatatagccaatccgcatcttcggtgcaatctccagtgtcccgcgttcaatattcgtcaatcctgctagtacgttaagcaacgtggttttccccgcgccgttttgcccagtaatcgcgatacaagcttgccgatcaatccgtaaattgagacgtttaaaaagttgtcgccgctgatatttttgcgaaaaatcacgcaattctagcactgctcccatttaacttgccaacctttactggattattttgcttgccaattagcgatgttttgcgcagccaaagctaaactcaacacagcatctttagacaaatcagcttggattaagttatgtttaacggttgcagccactgcaccaatgacagccaaaccatatgtcaacacttctaaatcgcgtttaacgagatattgatcttcataaacagcttcgtggctgtattcaaagttgactttgttttcagctaaaacaccatccacgtgggtcaccataatccgatcggtcacatcgattaataatttgtggtcatctgataacgttaatttatgatctgactctgattgataatatgtttcttctgtaatatcaaaatacttaacgaccgggttatttaaaacgccaaaatcatccaaaacagcaaaaattgtttctggatttaattgcactttgcgatcggcaattgctgccatgttttcttctaaccaatctgctaattggcgaacattatcctgtgtcatatgtgggactcctttaattaatctaaatgaattctatccctccataatacaccatccgcaatattagcgcgactgactgcaccaaaaagttactgtgacatcagatgatcatcaattacgccagctccttgtaagaatgaatagatgacgactggtccgacaaattgaaagccccgccgttttaaatccttgctgatttggatcgatagctctgattttgcggggacatccgcccaagttcggggccgatttacaattggctgtccatcaacaaagccccatagatactgatcaaagcttcctgcactcttttgtaacgcaaggacggcttgtgcattattgaccgttgcattcaacttagcacgattgcggataattgccggattggtcagtaactgctcaatttcggttggtgtcatctgtgctactttggcaatttcatagtctttaaatgctgtccgaaaggcagcacgcttatttaatacagtccgccaactcaagccagcctgatacaactccatacataatagttcaaataagcgttggtcatcatgttccggttttccccactctgtttggtaatacgccaataattcaggtgaatcatacatccaatcagcttttgtcattattaccacctcctaaattgaactacgcaaaaaggctaaaaagaattcatcctttttagcctttgggattgttatttattttttcttacttgctttttgataagggcgattttcaacatcagtcttgacgattaacacgtcacagatagctgtgcggttaacatattctgtcacagaacccatcaacatccgttcaactgcattcaagccagtagagcccatcatgattaaatcggtttgatattctgtcgggaagtcgcgtgcgataacattcttaggattaccaaaccgcacatgaatctcgacatcttttaaaccgtcattggtttggatatcatattttaaactgttgagataattctgtgcatcttcagagatttggaaaatagcgtctcctgaaagcatgccactataactccctgcaaattgcttggtatccaaaacgttcaaaatatccaagcgcgcctgattcatcttagcaacccacactgctttatttagtgctaattcagcttcttcagagccgtcaactgggacgagtattcttttatattcttgaaccatgttgttcatctcactttctctatatgcacctgttacactttaagaatataccgcttggaaaaacaattcaagcaaaaaagcgaagcgcttccgcgaacatttaattagaagtagtctttcttttttaaccaccaaccgacacaaaggctaatggctaatgacaatcctaatagcacgagaaaccctaacttactctcggctagcgggaccggtacgttcatcccccagaaaccacctaacgttgtcggaaccgttagaataattgagagtgatgttagtgtcttcataatattattcaatcggtttgaaataatatctgaaagcaaatcacttaactgtgccaataactcacgatacgttgtaatcgccttatcggacttggcaaactgcaagtcaatccgatacagtaagtctgtatgtcctgacacgcgctcaaataatggacttgccttaatttgcggaataatttgctggttactcttaagccctaaatccaaatagacaacactctttttaagagacttgagtgcatacaacaaccgattgcgtgtcgaaacatgtacattttcttccaattgttcaatctgttgcgcaacgaccgctaaagccgctaaataacgttgatagatggccgaaacactctttagagcaaccgtttcaatttgaccatccaggccttctaacgtgagtatttcatcgatgagctcggactgttgatgccccacagttaataacgtctggccactaatgattaacgaaaaaggccgcgtaatatattccgcatgatcttctgaatcatgggttttaactggtaccagtaaacaaatatgggtcaatacttcaccggtgtccgttgtaaatgtttcataccgtgcgacttcattgatatcttgggccacctcaaataacaccgctggtaagtggtattttttagcgaaatggtgcatctcatgtttagttggtgcttcaaaatgaatccagtcggcacttttttcagaggttccttcaaccaactggccctcaggtgtcatttcaaaatacgtaatcatctgctcactccactcttaatacccctatcatactgtttctccccacatactgacaagttaagttgattgcccattaaatatgctacaatattgatatcattggataaggagttgacgcatatgacacaccgcattttgccacttgaaaaaggccataactttagagaattgggcggctatcaaacaaaagacggccggacccttaaatggcataaagtcttacgttccgctagtctagcccacctaacaccacatgatttagcttatttaactgattatggcgtgcgctatgatgttgattttcgctcacctgaagaaactgccaagtcaccagacaaggtccctgccaatgcaatctatgaatccttacccgttttcaaaattgatgaaacggctagtacggcatcagaagctgatctttttaaaacgttcagtgctgatccaaaaagtggtcatgaacatatgattcaagtctatgtcgacttaattaaccaagatcactccaagcaagcttaccggcaatttttcgacttgttgctagcaaacgataaggaggaccaatccttactgtttcactgcacggctggtaaagatcgtactgggatgggcgctgttttcttgttgagtgcactcggtgttccagaagaaacgattcgcacagattacttattaacgaatcaagcttctgccgctttcgtgacccaatcgcttgcaaaactacaacaaaaaacacagaaccagtctgtgttcaaaagttatcagtcattactaacggttcatcaagattacctcgataccgccaaacaagcgattgaatccgaaaatggttcgttgcaagactatttatcacacgatctccagttaagccaacacgacttagctgacctgcgcaaaatttatttagcataacccatttgtttcacatgaaacttaaaaaaggagcgtggctttgaatgcccactttaaaagaacaagtgattgaggcgagcaaaaccatcggcatcgataagattggtttcacatcggcagcgccttttgattatttagaagcaagtcttaaggaacaaaaagcaaatggtcattcgactggattcgaacataaagtgcttgaagaacgcctttatccagatttaattttcgaccaacctaaatcgattatcgcgattgctcttgcctatccaacaaaaatcatcaataagccagcgcgaactggtgctaaacgcggtagttttgcccgcgcttcgtgggggattgactaccacgatattctgcgcgataagatggaccagctgatcagcgctatcgaaacacttgctgattcagatactgaaattacttttaagccaatggttgatacaggcgaactgagcgatgtggctgttgcgcaacgtgctgggttgggcttcatcggtttgaatggtttattaattacacccgaattcggttcttatgtctatcttggtgaaatcattaccaacatcccatttgaaccagacacaccgatggccaatcaatgtggcagctgtacgcgctgcatcgattactgtccaccacaggcattaatgggcgatggccgcctcaatgccaagcgttgcttatcctatcaaacacaaaccaaagggttcatgcccgaagaattcagaccaaaaattcgcagtgtcatttacggctgtgatatttgccaacaagtatgtccgtttaataaaggaaaagacttccacttccatcctgatatggagccagatccagaatctgtgatgcccgaattacagcccgtgctaaccatcagtaacaagcagttcaaacttcaatttggacaccttgctggttcgtggcgtggcaaaaagccacttcaacgcaatgcgattatcgcactcgccaacgtgaaagaccgcaccgcgattccgaagttactcgaactcatcgatactgatccgcgccctgtcattcgcggcactgctgcttgggcgctcagtcaattagtgcgcgatgtcacgcctgaaattttagactttctagaaacagccgcaaagcgtgaagaagaaccggaagcccaagttgaattcgacaatgcacttcaaattctaaaagaacgttattcagagaggtaggtccaccctagtatgtcagaaagtgctccgcaaaaaacagtccttacgcagccattaatccttttgatggcttttattaccggcgttgccgtctccaatctatattacatccaaccgattcaagcactcgtagcgaccactttccacgttacaagtggtgcggtcgggactgttgcaatgttgacacaggtcggttatgcacttggcttgttgctgattgtcccgtttggtgatgtgatgagccgttaccagctcatattacggatgcttggcttatccttactatccttattagccgcttacctagcacccaatttcattttctttgccttgactggtttgatgattggcctcacctcagtggttcctcaaatcatcattccatatgcagccgtcctcgctcaaccacaaaaacggggcgcagtgctcggcaccattctcagtggtcttctaatgggtgtgctcctatcccgaagctttagcggcattattagtagttacattcattggcgttgggtgtatctcatcgctacaattgcgattgcgcttttaatccttctggcagccctcaaattacctaaggattcccgtccaaaaaacgggccaagctactggcagacaatcagttcaattccagggcttatcgcgcaccagcggctgttacgggaagccgccatcaacggttttttcatgtttgggacacttagtattttctggtcgacactcattttctatatggccagtcccgcctatcgtctcggtagtggtaccgttggtctattagcaatccttggtgcggctggtgctttagctgcaccaattatcggtcgcttagccgatgctaaatcacctcgctttattatcgccactggcttattcatgatgaccatcagttatcttttattcttactctgggggcatttcatgccgattctaatgctcgggattgttttattagatgtcggaaaccagtgcggtcaggttgccaatcaaacccgggtccaaatgcttggtgaagccactagtagtcgcaacaataccgtcttcatgtttgcctatttcatgggtggtgcttccggttcattctttggcgccctcgcttggagcttcggtggctgggtcgccgtttgtctcttagcgctagcttatcaatgtctcgctttaatcgcccactttattctttatcgtcctaaatcaacaggttaattaatggccggtgtaacgttctcaattccgttacaccggctttttgatacctatcagtaaagcgtattcattgacagttgcatgttacgtatctaacatagttattatatagcaataaatttccaatcatcacaataggaggttccttatgacacattatctaacgtttgatcacgtttcaaagctctatcgcggtgataacaaagccgttgatgacatcagttttactgtcgacaaaggcgaattcatttgtttgattgggacgtctggttctgggaaaacaacaaccatgcggatgattaatcgcatgattaacccaaccaaaggaacgattaccttagatggtgaaaatctcgctaatgtagaccccgttaaattgcggcgaaaaattggttacgtcattcaaaatattggcttaatgccacacatgactattcaagataacatcacaattgtccctaaactcttaaaatggtccccagaaaaacgccatgcaaaggtgctcgaattactaaaattagtggaaatgcctgcggactttttagaccgttacccaagccaattatcaggtggacaacaacagcgaattggggtgattcgcgcacttgcagctggacaagatattattttgatggacgaaccatttggtgctctcgatccaattacgcgtgaggcacttcaagacttagtaaaacaacttcaatcagaactcggtaaaacaatcgtctttgtcacccatgacatggatgaagcactcaaattagcgtcacgcattgccatcatggataacggccaaatcatccaaatgggaacgcccaatgaaatcttgcgaaatcctgccaaccaattcgtcgaagacttaatcggtcacgatcgtttgatcgaagccaaaccaaatgtcgaaactgttggccaaatcatgcttaaaagtccagtcgctatcacaccaggtaaatcattagttgatgcgattcgcttaatgcgccaacgccgcgttgataccttactggttgtcgacgaaaaccaacatttaaagggactcgtcgatattgaaaatatcgaccatcattacaaagacgcaactagtgttggtgacattatgtctaccaagattagttacgtgaacgaaaatgatttggtccgggataccattgaacggattcttaaacggggctggaaatacgttcccgttatcaacgatgatcatcaacttgttgggattgtcacccggacagccctagtcgatgtcgtttatgatgctgtctggggtgatactgacgaatctgaagcagaatccgaccaacaatagaaagggaggaatcgatgatgctcacttttttaacagaacatggctctgatttactgattaaaacttgggaacaactctacatttccgcaatcgccttagttctgggcataatagttgcggtgccccttggaattgccctcacccgatttcctaaaactgccaaagtagtgattgccattgccagcatgctccagaccgtcccctcattggcactattggctttaatgattccgctctttgggattggcaaagtaccagcaatcatcgccttatttatctactcactactccctattttgcggaacacctacatcggcatgaacgatgtcgatccgattctaaaagatagtgctaaaggaatgggcatgacgccggtacaatcaattatgcaagtggaaatcccaatggcgacccccgtgattatggcaggaattcgcctatctgcggtttacgtgattgcttgggcaacccttgcttcatatattggcgctggtggtcttggcgacttgattttcaacgggttgaatcttttcaaaccggatttaatcatcggcgggacaattcccgtcacattgttagcattgctagtcgattttggcttgggccggttggaaaaacaactgacccccgctgcaatcagataaggaggctcctatgcataaaatacgccgattcattacgagttgcggattattagttggcagtctcctcctgttaagtggctgtcagtcacttggcatcggaaaccgtcaatcacaaacaattcgcattagctcttcaagcaccactgagtcacaaattctcgccaatattctgagcgagttgattacccacgaaacacaaaataaggtcactttaattaataatctgggttcttcaacggtaacgcatgaatcactaattcgtggtgacgccgacatagctgctagtcgctacgctggaactgaacttactggtactttaaaaatgaaacctactaaagatcctgaaaaagcccaaaaaatcgttaaaaaagctttcaaagatcgttacaaccaaacatggttcccttcctacgggtttgcggacacctatgcctttatggtcacccaggaaaccgccaagaaatatcatttagaaaccgtcagtgatctcggaaaagtggcggatcaactaacagctggtgtcgattccgtctgggtaaatcacgaaggcgatggctatcccgcatttaaagaaacgtatggctatgatttcaagaaagttgcgcccatgcaaatcggactggtttacagcgcactggcggctggtaaaatggacgtcgttttaggttactcaaccgatggacggattaaaagttatgacttaaaagtcttaaaagacgatcgccgcttcttcccaccatacgatgcgagcgtggtcgccactgatcagattctcaaagaacagccagcactagcgccccttttacaccgtctagatggcaaaatcgacctcgacaccatgcaaaccctcaactttaaagttgataatgatctactagaacccgcagtagtcgcaaaacaatttcttcaggaacataattatttccggaaaggagccgctaaatgactaatttaaatacttggcaacaacttgtctattatttccagcataatggcagttatgttttacggcagtttagtcatcattttttgatttcgatttatggcgttttacttgccgcgttgattggcattcccttggggatttttattgcgcaccggaaaaagctcagtaatgttataattggggtagcgaatgtcatccaaacagtgccttcactcgcaatgctctcaatcattatgcttggcttggggcttggcacacgaaccgtcattgcgactgtctttttatactccttgctcccgattatcaaaaatacttacaccggtatggagaatgtttccgataatattatcgattccggaatcgggatgggcatgacaaattggcaactgttacggatggttgaacttcccttatcattggccgtcattatggcggggattcgcaatgccttagtggtcgccatcgggattacagcgattggcgcgtttgttggtgccggcggtttaggcgacatcattattcgcgggaccaacgccactaatggcggcgccttaatcttagctggtgccctgccaaccgccctgatggccattatcgctgatgtgacgttaggctttattcaacgccacttagaagctccacaagcacgaccttaaatctcaacattaggaaggtgtcactatgaaactgtatcaagcattaacccaagtcacactaaacacacaaatggttgacgatttacctgattttcagattacaaccgttttagaccaaccattgaactttgcccctactcagctttaccattatatcgatgccgttttaaagagcggttctcgtcacgatgaaaataacctgttatatgtcacagacgcgatttttatcactgaaaactacaactttaaacaaactgaattcgcggcacttgccacaagcttcgaagaacgggtaacattagcgcgtaaaattgtggccgatctcaaccgccacgtctccgtcaatctcgatttagtgcaacatgaattccaactaatttttgtcgattagcacgactgccccaggcgatgttatttctacatctactggggctttttttattgaaatgaatgaacaggagtcctcactttgccaaatgcacagcgtcaaaatagcgcgctttataaactcaatcgtcccgccaaccaactaacaacggaacaacaagcactacaagaacaagtcattcaattttgtttggcaaaagcgcacgccgaacacgccaccttcttgattcaaggtgcggccgggactggtaagagcgtgattctcagcagtgtcttcaaggtactgcagacacttgcgcgccaaacacccacctcgccactctatggcagtcaaaacgttctattggtcaatcatccagaaatgctaaaactctacaaaagtggcacaacaacggcccccgttttattgaaaaaagattttcaacgcccaacgacattcatcaatcaagcggctaaaaaccaccaacttgccgatatcgtcctcgttgatgaggcacacctactgttaaccaaatccgacccctatagccacttcaatcaaacaaatcaactcgatgaaattcgccgacacagtcggatcaccattctgatttttgatgaacagcaagtgcttaaagtgaagagcttctggcaacagcaacaactccgccaacgaattgaagctgctccccatcagaccgcgcaactaacccatcaatttcggatgcaagcccatccaagtgttgaaaattgggtgcaaacctttcatcaacaacaagtcgctgccctgccacatgatccacactttgaattcaaaatattcaccgatgccaatgagctctatcaaacgattcgctttaaaaaccaaacgagtgggcttgcacgcatgctagctacttacgattttccagcaacactcaatgatggtcacgatcacttcgttgagacatcgacattcaaattacgctgggatcggtatcagccaaccgctaaaacctattgggcagaacgtgaagatagtatagatgaagtcggatccgtgtacaccattcaaggctttgatctcaactatgccggcgtcatcatcgggccatccgtcacgtatgatccacaaagtgagcggctagttattcatcctgaatattacgaggaccaagccgcatttgccggcgcagcacagccggctgatcctgaagccgcgaaacagcaaattattcttaatagcctctacgttctaatgagccgcgctagaaacggcctttacctctatgctgttgatcccgcacttcaggccaaattgctcagcttatgacaaatcgattttatttcccggggaataagtcggttttctgtctatctctatcgaaaacaagtaaactgtaagtagagattttaaactgataaaggagtgttttaatatgtctaacttaacgagttcatacacgctcacaaacggcgtgcaaattcctaaaattggcttcgggacttggcaaacaccagacggtcaaacagccgtagctgctgttgaagaggcgctcaaggcaggttatcgccacattgataccgcccaagcttacggtaatgaagggagtgttggtgaggccatccaagctagtggcgttgatcgttccgatttattcctaaccaccaaaatctggaatagtaatcacacttatgatttaacaatcagctcttttgaagaatcactcaagaaattacaaaccgactacgttgatttgctcttaatccactggcccaacccaattgcctaccgtgatgattgggaaacagccaacgccgaaacatggcgtgcaatggagatgctctacaaagctggtaaagtccgggccatcggggtcagcaacttccgtgttcgccatttagaagcgctcaaaaagactgcaacggtacaaccaatggtcaaccaactcttcttagcccctggcgaattagaacctgaaactgcccaatactcacgtgaacatggcatgttattagaagcttatagcccacttgggactgggaagattttcagtgtgccagaaatgcaagaattagcggacaaataccaacgctcaattccacaaattgcactacggtggtcattacaacacggcttcttaccattacctaagtctgtgcatgctgaatacatccaacaaaatgcccaagttttcgacttcgaattagccgatgaagacatggctgcaattgatgcacttgacggcgtcgttggacacgcgcaagatcctgatactgcaacattctaaaactgtttaaaagccactaacacagtggcttttttcgatacagatcaacgtcaaaatgtgacaaagcgtattttagtttagatatttaacaatttagtttacctcttccctaaattatggtattttcattattattgaatccgataaaatcggactaaagcccgacgttatttaccgttttaagcttgagaatggtaaaatagaactagttagttaagaaatggggaattattttgtcaagtggtgagttattcactaatctatttgttatgttggtcaccttctttttagccgccttcttcgtggccgctgaatttgcgctcgtccaaacacggccaagtgccttagaagatgccatccattcaggaaatggtaatcctaaaaaattgaatcttgcgcttaaaatgacgcaaaacttaaacgaatatctctcaaccacccaagtgggggtcagtgttgccgggattattttagggtggattggtgaatcaaccgtcgaaaccattctagtcgatctgctcggtctcactcacctgatttcaaatggtggcttacacatcatcggcgcagttgccggcgtgttagtcttaacctatttagaagtggttttcacggaaatcgtgccgaagaatattagtattgatattccaatgcagatgttgatggctgttgctaagcccctccattactgtcatattatcttctatccatttgtttggttactcaacatttccgcaacgggtgttgtgaaattaatcggcttttcacctgctgaagaaggtagtgatgtgctttcccaagcggaaatcattagtctctctaaaaatgccgtcactggtggtgaattagatcgcaacgatttagtttacatgcaacgggcctttgactttaatgaccggattgccaaagatgtgatggttgatcgcacaagtctctacgtcgtcgatatcaccgataccgttaaagacgtcttaaaagactacttacaacaaggctttagccgcttcccagtggttgctgaaaatgataaagacaagattcttggttacgtctacgcatatgatttagtccgtcaggcacaagtcgacgattcaatccgcgtcagcaaattactgcgttcgattatctccgttccagaagcaacccctattcacagtttgttgaatcaaatgatcaataagcaaaccccaattgtggtcgtcgttgacgagtacggtgggacgagtgggattgtcactgataaagatatctatgaagaactattcgggaccgtcaaggacgaaattgacgatgtttcagatgaatacatcatcaaagaagacgataaccgttaccgtgttagtgggaaaacgacgctctatgatttcgaacgtttcttcaagactaaaattgatgccttcgaagcctcagatagcgtgaccctggccggttatgtcttagaaaacttcaccgacttacaacaaagtgcggtcattcatatcaatcaattcacattaaaagtggtcgaattcaatcgcggttacatcgactggtttgaagtctccagcgaaccacaaaataatacagccaacaatacaattattgaaaccaattaaaaaaagagtgtgctatcagccatctcctgaggattaaccacaaggagatggctaatagcacacatttaaacaaaaacagccttgcgcaaatgcgcaaggctgttttttaatttcgttatgctaaataatcacgactccagatgagccccattactttttcgccggtgtgcacgccgaccacaggaccaatgtgactcgtttcaatcggcatccctgggaatgtttccgtcaacgttgcgacccactgcacactttcttctggattattaccgtcaatcacgctaacgcgtacgggatagtcaacagattcgactgctgctttgaaatccgctaatactttttgaaaggcccgtttcttggtccgttccttcgttaaggcaacaatttggccggcatcgttaaaacttaaaatcggtttaatccgcaaaagattcccgacaaaggccgcactattcgaaatccggcccgttcgcaagaggtggcttaaatcatccacaacgaaataaacgcccatcgttgctcgtaaagctaccaatttcggcatgatagttgcggcatgttcaccttgggcaactaaccgcgccgcttccaaggccaagaacccttcaccggcactcgtaatcttggaatcaaaaggatacacttcgatgccttcaaccgactgtgcgtaggcggttaggttattgacaaagctcgtaatgccacttgaaagatggatacaaatcacttcatcgtagcccgcttttatcaattgatcaaaaacctgttgcatctgacccattgtaatttgcgaagtcgttggtaatttttcagtagtgcgcattttatcgtaaaatgcttcactcgtgatatcgatattttccaaataagtttgttgtccaaaaataacggtgattggtaccacagtaatattatggtcggcggcaacttgtggatctaaatacgccgcactatcagtcacaattgctgttttcatgtcaggctcctcaataaaactgtttttgtcattatcccaccaatgtggataaagtacaaatgaacaacaaaaaacgccggaccactttctgcccgacgccacagttattaatgagtcattgattcattctcaaatacgacaatggagatgtgcccatcaattaagccactgttattactcaaggttaacatttgattcttttcgttaacgtctaatacttcatgttcatcaaagtagccagctgcataatctttgtagtaaacagcccctagatttgattcaaattcatctggataatctttaatgtcagcatccgctggtactaatagcaatctaaagttcgtatccaacgagcaataaccaacgtttgaaaatggaccaacaccgtcatctaagtccaataaaattttttgacccggtgtcatcttatccttgattttcgcaactgctgcaggtgttatttttaatgccatatcaatcatccctttcatgcttccagtctaccgccgttttaaatttgacacaatctatctgctcagccagtgtgctacaataggcttaaccgtttatttaaggaggtcattatgcttttttatcggtattcatactttagcaatcagaatgatttcgaattctatctcaaactaagtctgtcagtgatcatcgccagtttaatcatcatcttcttcgttcaatatctccgccaccgttcagattcgaagtaccgtgacttactaatcatcttcggcttagttgggattttactcgccggcattcaatatacacggattcaacagcttaacaccgcccactcgcaacaagctcagatggcgcaattcattagaagtgtggcgactgcgcagaaagctagccttaaaaccgtcgcagtcaacacgacttcgcttcagcaaaacatggtagtgcgcgtcggtcatcaaaactaccaagtcatatttgataacaattttactagttatcaactccaaaaagctcagttgattagccaagacatcacctatcaagattaaggagtttactatgccatcttatttcgatattaccattaaattaattttcggtttcttctgtttagtgttacaaatcaacctctctggcaaggggaatttagcccctagcagtgggattgatcaactccaaaattacgttcttggggggattgttggcggtatgatttataatgccgatatctcgctcttacaattcttactcgttttactcatctggaccttaatcgtcttcacaatgaagtttctaaccactcacaatcgctggattaaacgctgggtaattggtaatccacaaacaattatcaccaacggccacattgatattcaaacggcctctaagaatagtttatccgcacaggatctatcgtttaaactccgaattgccgggattagcgatattcgcacggtcagtcgcgcaatcttggaacaaaacggacaattaaccattacgcaaaaaggcgacgccacgattaaatatccgctgattatggacggccagattaattcagaagcacttgaattaatcgatcaaactgaagaatggctcctcgccgacattcaacagcaaggctacagtcttcaacaaatctacatggctaactacttgaaccatgaaatcgtgattacgccctattaaaaaagatgacccgcaaaggtcatcttttttaatgtcgtactctttggagaagcgttgcaaccaaccagacaatcgccccgccaattaaaacaatcgtgcttgtcttcaaaccataatccagaacagccaacccatagtcggtaattgtttgattaaaatcgcccgctttttgagcaatttgttcaacaatgccactatatttaaacgcagccgcccctaatgccaagaataagccactccaagcaaaacttgcaccaacactccctaatacataccggaattgaccacttagtccccattgaactagtacaagaacaattcccataataattgcaacccaagttaagatattgatcacatttctaacaaacaacatctcagtcgctagtggtgctaagtaaggtgcttcaatttggttcgtgaggtattcttgtagtggtggttgaaccgcaaccactgccgttttaattaaagattccgtcaacgcattttcaggcacaactgcttctaaatgagttgcaagctgtcccatcatttgtgctgtgggtaacggcttttcttgtcctgtataaatattatgaacagttttctttaaatcggcctgcacatcagattgagtcagtaatttgacttgtacttcagttggtagcccatttttttgtgccgcatctaataaaacaacgttaattttatcagtcatcgcagctaacgtcttcggttcactgagctgttcttgcgtaaatgattctctcaaaactgtcaggctgagaatcatgccaccaatgccaaggaaaacgcaaagaaagattaagaacgtcaaaaagcgacttaaacctcgatgtggtcgcacgcttggttgattttgattcaaacgactaattggttccattgattaaacaccctttctattcacgaaccctattaaacttcaagactaggattcttaatcattaaatgctaaagtgaacttatcagtcacaggaggccattcaatgttaaaaaatttaacgattctctatatttcaattgctggtaatacacgttcatttgtaacggatttacaggattatgcagcgcaacaacatgctaataacccagcgttaccaaccattaccctcacagaaatttcggatgcgaccccctttaaagcggagaccgaaccgttttacgcgttcgttccaacttacttagatggtggcaacggcattgataatggcgttaaagaattaatgaccaatagcttaggcgaatacatcgattatgcgcagaacgcacgcctttgttatggagtaatcggtagcgggaaccgcaacttcaacgaacaatattgcttaactgctaaacggtatgcggtccaattcgatgcaccgtttatcgccgattatgagctccgtggcaatgcgaaagatgtcgcgcggatttataccttaatggtcgctaacgcgcaacagcatgcctaaaatttaagattagccggtaatgatgtgattaactcgctgggttgttggacaatttggacagcacccgcctttttgagttccgcgattgtgccaaacccataactaacaccaactgcattcatcgcgttttgcttagcgcccaagatatcattttggcgatcacccaccatcagtaatggtgcggtttgtggtgctagaccaagttctgataatgcgtaagtaatgacatccgcttttttgacccgcgttgtctcatcaacacttgctccaaaaacaccgctaaagtaatcacttaactctaaatgatcaatgaccttcttagcgaatggttctggtttcgaagtcgcaattgccagttgtaaatcctgtgcttgcaatgccgctagggtttctcgcatgccaggataaagttgattttcatacaaccctttaggcgcataataggcttgaaagactttaatagcttcttgagtagcagctgcatttaaaccaaactcacgcataattgtttcattgaggggtggcccaatgaatgtgaccagttcagctttggtttgcgtcggcaatgataactcctcaatcatatattccaaggcgttcacgatgccttcttgcgaatcggctatcgttctatccaaatcaaataaaacggtcccctttgtcatatcaatcatctctcgatctcttataaagtaccttcattttagcatactctttgacccttaaactttccttattgcttttttcataaatctataaacctctggtcacaaaatcttcacaaattcccattatagtattgagtatagaaaagcgaatcttttctatttcatactacttaactttttcattttactcctccaaagtaaaattaaggtagacgcaatctaccacgcacgtattattcccccaaagtaatacgtgtaccccttactcctttttagatcttcggatctgctagaaaccagtctccccaaggctggtttttttgtgtccccatcaaaaaagccgccagaacaatttacgttctggcggcttttctcatttttaaagtaggtactgttgcatcagttcaacggttttgagctgggcatcgtctgatactttatgttgcccattttcttccgtcgtcaatgtcactaatgcggtggctgaacttggttgcgcctgaatttcggtcataaaatctgccgtgaattgatatggcaccatcgtatcagcagttccatgatagaaatgcaatggacgacctgccaagtgatcaacgtgcattgataagtcatacgccgctaaccgtgctaaggtatcttcaatcgcatcttgatacttggtttgtaaggccgttggtaattgactaacctgccatttagcaagtgcgacaggcattggtgcgccaatcttatcaacgccaattttgacattcggatatcgggtgagaatcgcatcggttgtaatgccacccatcgaagtccctgtaacaccaatccgttcaggatcaactaagccttcagcactcagtgttgcaaccagttcaccaaactcggtgaccgactgcatcacaatatcccaaaattcaaacattaactcagaaaagagctgactaccatgtcgtttaccatgatacttcgcatctggtaagaccacgcgaaaaccagccttggctaaaaagtgggcgaccattaattctgactctttacggtgcgtccaaccatgatatacaaagacagttggtaataccgctttttcttgaccacttggggccacaatcaacgtactgactgccccaatttgccgttcttcagtgctaatcatctcaaatcctcctcaattgccatttatttcccgggtaatattaaccgaagaatgaacctgtaatcttaaaacggcgtttgatataaatccgcacgccgattaagagtgctgcaattacgatttgaacaagtggtggcaagactggattcaagaaacttggaatcaagattgtcacaccgtatgccgcaacaaaggctagtgttaagccgattacaaccaatgccatcttccaaaatggtggccgttgttcttttggcatttgcgtatagcgcattggataagtcatgatgatccccgcaagcgcagccgtaatgacaattgatgtaatcccaatgctggttgctgaccccttcgttgagaaataagccgcaattccgttaaaggctaggtacataattaaaaagattaagccgttatcaagcatttggagttgaagtgatgtttgcttaggacgttttggcgcgtgcaacaattgatcaatcttggttgtcactggaccatatacttgtgttgcaggcttgcccttatgttgttctgctaccatttctggtaacatttctgccaagatttcagtttggcgttctgctggcacttgttcggcatttaatgcgcgtttgaacttaaataaatagtccgcatttttcttactgagttttgcttctaacccttcaatatcaactggttctggggttactactggttgttcgttcttagccaattgtcttcctcctcaattatcattaaacgttaaatctaaattcgatgatgtcgccatcttcgaccatgtattctttaccttctaaacgtaaacggccagcttctttaacagcttgcattgaaccgtattgatctaaatcagcaaaagaaactgtttctgcccggataaatccgcgttcaaagtcggaatgaatgacaccggcggtttgtggggccttcatgccttgacggaaagtccatgcccgggtttcttttccaccagcggtaaagaatgttgctaagcctagtagatgatatgaagcacgaatcaatttatccaaccctgattcagtcaccccttcggcttccaaaaattcagccttatcggcatcatctaatgaggcgatttcttcttcagttcttgctgagatggcaattacttcggcgccttctttagctgcggacgcttgaatttgtttaacataatccacactatcaggatcagccatggcatcttcagcaatatttgcaacatataaaaccggttttgatgttaataagaagaagcctttaactaacttcgcttcatcttcattaaattcgattgaacgtactgagccgccttcttcaagaacaggcttaatctttttaagcacttcgaattcggctaaggcgtctttgtctttcgtccgcgcaatcttttcaacacgcgcataacgcttcgtaacactttctaaatcagctaagctcaattcaaggttaattgtatcgatgtcgtctaacgggtcaacagttccggtaacagaggtaatattatcgtcgtcaaaggcgcgcacaacatgcacaatcgcatcgacttgacgaatattctccaagaacttgttcccaagcccttcacctttgctagcccctttaacgatcccagcaatatccgtaaattcaaaagtcgttggcacgatctttttagccgggataatttcttgaatccggtctaaacgcttgtcagggacttcaaccatgccgacgttagggtcgattgtggcaaatgggtagttcgccatttcggcgcctgctttcgtgatggcgttaaataacgttgattttccgacgttgggtaatcctacaattcctgcggttaatgacatagttttttacactttcctttactttaaaaattagtttggttgggaccttgttgcatctcttgatagtggggttcatccgcaacaacgacttgtgctgcaggcaccaaattcttcttaagtttcttttcgaattcacggcgcggtaataagacggcgtggccgcaccccatgcacttaattcgaatatccatccccaagcgcaccacttcaaagcgattggtgccacaggcatgttgttttttcatctgaacaagatcgcctaatgtatacatctagctcgactcctcactttaatcgatattcacatctagcaatgcaagaatccggtttaaatcatcgactgtgctgtaatcaatctcaatctttccgcgacccttgctgttaatcgcaatattgaccttggtgtcaaatttatcgaccaattgattttcactcgcttgaatatagggtgatttaatcttggtcttcgtcactttcgcagctttaatctggttcatctggttaattaactgctctagttgtcgcaccgttaagccttcatcaatcgtgcgtttcgctaatgcactaatctgactttttttcttcaatgataataacgtccgcgcctgtcccattgaaaggtcaccattttgtaataacgtcttcacgtcattgggtaaacccaataagcgcaagtaattggcaatgtatgggcggctcttgcccaaccgttctgatacttcagcttgagtcaggtttaactttttcaagagtgtatcgtaagcttgggcttcttctaacggcgttaaatcttcacgttgcaggttttccaagaccgcaatttccatcattgcggattcatcaaactgccgcgtgatggctggtatcgctgttttaccagctaacttagacgcacggaatcggcgttcacccgcaattaattcgtaaccattaatacttttgcgaacaatgattggttggaaaacgcccgacttcttaattgacgctgctaattcagccaaagccgcttcatcaaatgtcttccgcggttgatagggatttggacgaatatcatcaagtgcaatctcttcaactaattcatccgcccggtttttattagggccttcgaacgctgaaaatacagcatccaaaccgcggcccaatccttttccatttctagttgccatgagctgctaacacttcctttgccaaattttggtaaacttcagcgccccgtgattttggatcataatcaatgattgatacgccatgactaggtgcttctgctaagcgcgtattccgtggcacaatcgtgtcgtaaacccgatcaccaaaatacttacgcacttcttcaatcacttgagcccctaaattcgtccgcgcatcatacatcgtcaacaacacgccttcaatcgctaagtttgggttaaaatgtttttgcaccaaacgaacggtgtttaacaattggctcaatccttctaaggcataatattcactttgaactggaatcatgattgaattacttgccgtaaaggcattgattgaaagttgccctaatgaaggtggacagtcaatcaaaacgtaatcataatcggctaagactggttctaaccctaacttcaagcgcatttcacgcgccatctgtgatgttagctcgatctctgcccctgcaagttgaatcgtagctggaacaatgtctaagttcttatgtgatgttttaataattgtttcttttagtgggaattcatcgaccaacacatcatagatatctttttcgacttgggatttttgaaccccaatcccgcttgtcgcattcccttgtgcatctgaatcaatgattaacacgtgattgccagcatccgccaaacaagcgcctagattaatcgtggtcgttgttttaccaacgccacctttttgatttgcaattgaaataacgtgtgccataatgagcctcccttattgctttggaatttcgatcgtaatccgataaacatcatcttgttcttcttcggtggctttgacggcaatcccgctttgttcaaccatttgaaccgactttttgatggtgttgacggcaatgcgtgtatcatgggcaattgctttttttgctttatcgttcgctttttttgccttcgtggtagcttcttttaaactgtcatcggttgcatcaactgtctcttcagttgattctggttcaggattcaacgtcttgttaaccagcgcttccgtatccttaaccgttaattgttcagccaagatttggtgtaaaatcatttgttgcttgaattcatccaaccgtaaaaggctccgaccgtgtcgttcagaaatttcatgattcatgatggcttcttgaacgggttgtgagagtttcaatagccgcaacttattagcaacaaaagattggctcttacccatcttttctgccaagctggcttgtgtgaagtcgttcagcttcattaagtccttataagcttgtgcttcttcaacggcggttaattcttcgcgttgtaagttttcaatcaaggccattgaagctgtttcgtgatcatccatagtttgaacaatcgctggtaattcagcccatttgagggtttgaatcgctctaaaacggcgttcacccgcaataatttcatatttttgatcttcatattcacgtaagataatcggttgcaataagccgtgttgttcgattgtgcttgctaattcggcgatattgtccgcattaaatacttttcgtggttggaaccggttaggcacaattgctgaaaccggcactttgatcacttgattaatacttttatcgtcttttttcttattaaaaaatgagagtgccattatttttcctccttagccattaacggttttttaactggcacaccagcccgccgtggatacttggcaggtgtcggtacaaccttatcaattacgattagatgtcgttgatcatctgtttctggtagcgtcaaagcaatgtcttgtgcaaattggccaccaagtgtttcgattgcatagttggcttctgccaattccgtttcaccttgactcgcttttaatgcgataaactgcccaccaactttaacagttggtaaacagaattctaccagtacatttaatgaagcaacggcccgggcagtcacaatatcaaactgttcacgatatggactcttcgggttgctgaacagttctgctcgatcatggaccaatgtcacatcagacaagcctaattcacggaccaattcttctaagaagtgaatccgcttgtttaatgaatcaacaatcgtaatcttcaattgcgggaataaaattttgattggtaacgatggaaaacccgcgcccgcaccaatatcgcagatcgtaaggggttcagtgcgtagtttttcaagatacaaagttggtgtgacagaatcgaagaagtgcttgagataaactgcttcttgttctgtaatggctgtcaaattaacttgttggttcacttgtacaagccgtttgaaatacaattcaaactgatccatttgtgcttgtgaaacttgaatattgtatgtttttaacgtcgctgcaaaacccgctggtgtcattatttctccttaactatgctttaaagtaggcgtttaattcgtggaacattattgtttcacatataccttttagtttaacgtacttaccctaaaaaaacaagattcttcccagttttcagattatcgtttcatgtgaaacataataatcggtaatttaagaacaattatcgcctttttcaagcgaatcattcagtaagaaagcacttttgtcatcgaacagttggtgtgcatcatcacaaaggcgaactatcgcgattatttaagaatgttatattcgttttttacttaatttctaattgaagtcactattggcgtgtgctaaactaaatgttaactaaattttaacgattatcttggagggacactcgtggcagatatacactcaaattcagcacagccaattaatccaaatgaaaagcttccccacattaaagcagcgattctcggcttacaacatcttctagcaatgtattctggcgatgttttaattccattacttgtcggggctgcattacattttaataccgctcaaatgacttacctcgtttcagtcgatattttcatgtgcggggttgcgaccctattacaattaaaacgaaccccactgaccgggattgcattaccggttgtcctaggttgtgctgttgagtacgttggcccgttagccgccatcggcactaacagccaactcggaattgacgttatgtacggtagtattattggcgccggaattttcatcttgttagtttctggcttgtttgcacgtttgcgttggctcttcccaccagttgtcacagggtctctcattacattaatcggattcacattgattcccgttgctttccaaaacttaggcggtggcgatgttgctgctaagtcgtttgggagtacaccaaacttaattaccggtttttcaacgattgccctaatcctgatttttagtatctgggggcgtggcttcatccaacaaatcgccattttaattgggattattgctgggaccttaatcgcagctgcgattgggattgtgtccttagatccagtaggtcaagcaagttggttcaaattacctgaattattctacttcggaacacctcgttttgaatggtcatcaattgtttcaatgtcattggctgcgttaacgaccatgattgaatcaatcggtgtcttcttcgcccttggtgaaatcgttgggcgcgacattactagcaatgatcttaagcggggcttccgcgctgaagggattgccgctatcttagggggattgttcaacaccttcccttactcaacgttctcacaaaatgttgggattgttcaattatccggtatcaaaacgaaaaaaccagtttactactcagcattcttcttaatcatcttaggattattacctaagattggggccgttgcaaccattattccaagcgctgttttagggggcgcgatggtcgttatgttcggcactgttgggattcaaggcattaagatgttacacaaagtcgatcttgatgataaccgcaacttactagtcgctgccgtttcaatcgccttaggcttaggggtagcaattcatccaaccttgctccaatcactaccaacgagtgttcgcacaattctaggcaacggcttagtagtcggcagtctcagcgctgtcatcttaaacttactattcaactatcgttcattaattgcagcaaaacatgctgaacaaaaataaatcaaaaaaagtgcctacaaatttaaccgtttgtgggcactttttttgtctattcaatttcagttgtccgaatacttctagcaagtctatttgtcatttcaaacagctacattaattctggcatgctaattttcttatctgattcagtaatacttttaatgtaagtttcacacgcctgctcaaatcgacgataaattgattctccagcgggagaaactgctatatcaacaattcgacgatcatcctgtttgccatattgtttgctgatatacccctgatcctctaatttacgtaatttatttgaagatgctgcggtagatgtttttaatacttgtgcaatcttactattattaatacctttatagcgttttaatgtttgtaaaatacgaatttgttcgatggtaactccgtcttcatttaaaacttgactaatgtttgctgaaatttgagccatctcatgatagaaattaatcaactctaatttatcagtcgattgcgctatagaattcatcattcctcctccgtttcattcataatcctttgataaaactggtgccatcggctaaaatactgttgcaatgagaaacagtcgttaatcgtttgccgggcatttcgtgaatatgtttcacgtcgcatctgactacctagaaaatcactgagttgttgaactaagccagcgtcatctcctggtgtcaccaaatccccgttcacatgattctcaattacttgtggaatgtccccgacattcgtagctaaattgggaattccataagccatcgtttctaaaattgccattggtaagccttcttgatatgtgggcaataggtgtaacaggctttcttgaataacggtattgcgatccgccaaagctaaccagccaccaaggcgcacattggttaactttaggcggtctatttcttgctggaccttcccctgttcaccatcaccatacaacgtaaattgaatatccggaaaacgggattgaatcacccctgctaattttagaatatcgtaggtgcccttacgttcgcctaagcgccccagtgtgataatttgtttagactgactatggtatttgtattgcttaggtagttcaaccgcattagcaataatcgtaatcggtgtttgcgtaagtgtttggtaaaaagttgcccattcagtgcttaacacaacaatgccatccatagccacggaaaacaatgttaatattaattgaaattcactatagattcgcattatattaactatttttggatataaataaacttttaaatatctttagaatattctcataaaactaaagtaacgatgttatcattctatttctccctcccattattgtcatctaattaacgaatatcagttaatatgcccatcaaaaaaaccatcataattaaagtttttactttaattatgatggtttttttaagtatttcatttacgataatattcactatttattaaaaatagtcattactattggtccgcatacgaaattgatgagaacttattaaacgttttgacaaataataatttgactgtccctcgtgcacccgcacggtttttttcgataatcacttcaacttctccaacgtccgcatcatctgactgctgtggcgctggtgctggcggattgccaccaccgaaatcatcgccatcttccctaggttcatcgcgatagtaatcatcacgatataagaaagcaacgatatcagcatcttgttcgattgatcctgattcacgaatatctgaaaggactgggcgtttatcttgtcgttgttcaaccccacgagagagttgagagagcgcaatgaccggtacccgtaattctttagccaatttctttaattgacgtgaaatcgccgagacttcttgttgccggttttcttggccggaaccttcaattagttgcaagtaatcaatgacgattaagccaacgccccctttttccttcgctaagcgccgacatttcgcccgaatttccgccattttcacgccgggcgtatcatcaatatagatattcgcttttgaaaggctccccatggctacgattagattctgccattcaagttcgtcgagttgcccggttcttagatggttggcgtcaatacttccttctgcacacaacatccggttaacgagttgttcagcacccatttccaaactaaaaattgcaatattctcattggttttcgtcccgatattctgagcaatgtttaagacaaacgcggttttccccaccccgggccgggccgctaaaataatgagttcatcttcatgcaaacccgcagtaatcttatctaaatcgcggtatcccgttgatagacccgtaatgtcttcttcattttgatataacttatcaatttgttcaattgaactcgttaagacatctgaaattgatttgaacccggccttattttgccgttcggaaacatccatgatttccttttcagcggtatctaaaatatccgtgacgtcttcatcttgcgcgtaaccctttgccacaatattttgagcggtttggattaaacggcgcagcattgctttttcagagacaatcttggcataataaactacgttggctgccgttggtacagcctcagccaactcagctaaataaccaataccaccgatatcttccaattggttctgcgcatcgagggcactctttaaagtcaccgcatcgattccttcaccccgttcgtttaattcaaccatcgtctcgaagatcaaacggtgggctttacgataaaaatcgtcggcagtaacgtattccattgcttcaacgagcgcatcgccactaataaagacggcccctaaaacggcctgttccgcctcattattctgcggcggtacttgttcaattagttcattattcaccatttttactcctttggttaatcgacttcaattactcactagtttactcaaaataccagtgactggcaacagtcaccgattggtcagcaataaaaaaagccgtgatagtggtgctaatcacggtcttttcaatcattcattttattattcggttacgatatgcacacgaatcgtagctgttacatcagggtgaatccgtacatcaacattccggtaacccaacgctttgattggttctggtaaatcaattttccgtttatcaacattgatctgatattgttgagccaatgcttgggcaatttgcttgcttggaattgaaccaaataagcggctgtcttcgcccgctttagatttgatttcaacgattgttttatcgtcttcaattttggcttttaaaacctttgcttccgctaattcagcagctgcatttttagcttcagcatgttgttggccttttaaagcactgatagcagctgatgttgcgggttttgctttcccatttttaattaaaaagttttgtgcgtaaccatctggcacatctttcacttggccttttttacctttaccgcgtacatcttctaagaaaataactttcattgttctgaccaccttatctaattaatcgtttgttgcttccttgtccgtttccggatcaaatagctctgccaaaaccgttaataacttcgccttggcttcggaaacagtcgtatctgccatctgcgttgccgcattggaaagatgaccaccgccacctaatttctccataatcacttgcacattcacatcacctagactccgcgctgaaatggcaatcatgccatctgggcgtttcacaatgacaaacgaggcttcaatgtctgacaatgacagcaaggtatccgctgcttgtgctgcgatgaccggatcgtaggtacggttgtcctcacccatacataatgccatatttggctcaaccatttcaatggtttcaattaaatgattcttttgaatataattatcgacattttcttttaacaagtgttgaaccatcgaagcatcagccccaactgaacgtaaataactagctgcgtcaaacgttcgcgtcccagttcgcattgaaaatgactgcgtatcaaccgtaatcccagccaacatcgttgtggcttcgaacttgttaatattagcgacattttgtggttgatactcaaacatttccgtcactaactcacacgttgaagaggcgtagggctcgatataaaccaacattgggttttctgggaactcttccccacgacgatggtgatcgatgacaatcgtccgctgagcaagcttctcgtacaacttaggcgccattgttatggatggtttagaatgatcgaccatcactaataaactattggccgttgctttttcgagcgcttcttcaggcgacaacacttccactgcaatttcagggtaggctttaacttcctctaaaagacgttgaatatctgtatgaatattgttttggtcaacgaccacgtagcacttcttaccgttcatctcggcaatccggcgaatcccaaatgaggcgcccaatgcatccatatctggccgaatatggcccataacaaagacttcgtcaacttgtttgaagatttcttgtaaggcttgtgaaatcatccgtgcacgaacccgcgtccgtttttccatcggattagtcttaccaccataaaaacgtgcttgtccttcactcgctttgacaacgacttggtcaccaccacgaccgagggcaagatccaaattgctctgtgaagttgttgctagaacggctaaatcggattccccataagcaaacccaacactcaacgttagtgggaagttttgtttggatgtttcttctcgaatttcatctaaaatcttaaacttctcttgttcagcggcgtgtaatgatttggcgtacgccaaaacaaagaaatgatcatcatcaactcgcttcaagaacatctgaaattgattcgcccagcgtgataactcgttggtgacatagttattcagattagaaacagattgatcatccattgtctgagtgatttcatcataattatctaagaacacttgcccgatggctacttgctcatcttcataacgatcttcaatggccgcatagcgtgtaatatcgagaagataaaccaccccaatgctttcttggataatgatttggaattgattatcgccccaacgaacaatttttgtttcattagcatcttcattttgtgcgactaattctgccaactctggatcgacagacttaatctttttgcctaaaacttctttattaccgaaatattgctgtaaataaggattcgtccattgaatctcacctgattcgttgtacaataaaatcccaattggcatcttaattaaagcctcttgctcgccgcgcttaatgcggtacgacaagtccgagacatacttggctgtattctcagtgaccgtttcgatcgcgtatagcacagtaatgaccgtcccgattagcagcacgaataaaattagagcaattagccaatctaacatcgcagcaaataccaaactaaccgctgtaaggcccaacaaaatcagggcaacggtccgcaggcgagtatcatctaaaaactgtggtaattttaattgtttaaacttatttttcatgtaaactccttaattctagatcccattctgattcttgttcatctatcattgagtctatgtggttctttactaaaacttaaaaaatactacttttattttagcacaattgccctacaattaccgctttgaacccgtaatttaatcccatgttcccctattaaagcgcacaaaaaaagacctgctaaacagtgtttagcaggtcttttggttgactgattagtcttctgtaacgaatggtaataagcccataatccgtgcgcgtttgattgcaattgtcaaacgacgttggtttttagcacttgtaccagatacccgacgaggtaaaatcttaccgcgttctgagataaaacgtttcaataaatcagtgtctttgtagtcgatatattcgatgtggttagcagcgatgaaatcaaccttacgacgacgacggttgccgcctcttctttgttgagccattgaaagttcctccttccaaaacagtttattttagaaaggtaaatcatcatctgaaatatcaattgcttgaccattatttgcaaatggatcggcttgagtgttatttgcagctgatggattacccgattgttgagggctggtaaatccagattgttggctaccattgctttgattgttgttaaagttttggcttgcgccatccccttgccgttgctccgttgttgtccgtgattctaacaatgagaagttatcaacgaccacttcggttacgtatacacgttgaccttgttggttttcataatttctcgtttgtagacggccatcaactccgactagtgagcctttcttagtgaaattagcgaaattttccgctgatttacgccagatgacacagttgataaagtctgcttcacgatcaccattggcattcgtgaattgacggttcactgcgattgagaaagtcccaacagcagcaccactagaagtgtaacgtaagtcaacatcgcgtgttagccgaccaacgagtacaactcgattaatcattctgtcagctcccctctattcaataattacaattcaaaattagtcttcgcgtttaacgatcatatggcgtaatactgagccatcaatcttagctagacgatcaaattcgtttaaagcttcatcattatcagctaaaacatttacgatatggtaaatgccttcgtgttgattgttgatttcataagctaaacgacgttttgaccagtcttttgaatcaatcacttcagcgccgttgtcttttaagatgccgtcgtaacggttgacaagagctgttttactttcttcatcaagtgttgttgagatgatgtaagtaacttcgtattttgattgagccatgactgttcacctccttatggactttaggttcttacctgtgtaagaacaaggagtaactgactaataaaaattagcctcacgatttagaccctgtgtctaaatcacagatactcacaagataaaattctatcataacggccgttaaaatacaatctaaaataaaaattgttgctgctaacacgcttggtaacagttgttacaagtgtatttacgcagaaacgatttttatttttttaatttaattaattttctgaatcttgatcatctgatgccgattgatcggcttcagcccgcgcgagtaattcatcgacttgtgctaagccagtatcagtagtgtcatcagttggtgctattggtgccgtcgttgcttctggtgtttcaggttcatctggttcagcttcgactttcgccattgttgcgaccttcgcttcgtcatccacccggattaaacgcacaccaagtgtggcccggccagtttgtgaaacgttagcgaccttgaaacgaatcaagacgccagtatcagtgattaagagaatatcctcttctccagtgacggcagcaatcccagctaatgggccgttcttttcagtgatgttggcagtcttaatccctttcccaccacgacccttgattgggtaatctgcaaccggtgtccgtttgccgtaccctttttcagagataacaaggatttcttgacccggaatcagtaagtcagagccaaccacatagtcgccttcacgtaaccgaatcccacgcacaccagcagcggttctccccatcgaacggacagctgtctcactaaatgacacagcataaccattatgggtcccgataaagatattttgttgcccatcagtcatcaagacgttacttaattcatcctcttcccgcaaggtcaatgctttcaacccattgctacggatattggcgaattcagaaacggatgtccgtttgaccgtccctaagcgggtaataaagaagagtgattgttcgtcttgcacttctttaccaacattaaccacggtctgaacgcgttcatcagaattaatgcctaataagttaatgattggaattcccttagcagtccgcccatattctggaatttcataccctttggcacggtaaactttcccagtattggtgaagaataagagcacttcatgagtcgaagtcgaaagcaagtgttcgatgaagtcgtcatcatggacgcccatcccttgaatcccacgaccaccacgattttgaactttgaattcgctggctggtaatcgtttaatgtagccgttatgcgttaatgcaatcacaacgtcttcttcttcgattaagtcttcgtcttcaagactaagcacttcacccaccaataattctgtccggcgtttgtcaccgaatttactttggagttcaagcaattcatcgtagataatcttcttaatgcgttctggtttggctaaaatatctttcaaatcagcaattaaagtcatcaaattattgtattcattttcgactttatcacgttccaaaccggttaatcgaactaaacgcatatccaagatggcttgcgcttgtttatccgataaatcataacgatccatcaacaagaccttagcggcatcacctgtattcgaaccacgaatgatctgaataatcgcatcgatatggtctaaagcaatgcgtaacccagctaaaatgtgcgcccgcgcttcggccttcttcaaatcaaattcagtccgccgacgaatgacttcttcttggtgcactaagtagtgttccaagattgatttcaaactcaagactttaggggcaccattcacgatggccaccatattaaatgagaatgaggtttgtaatggtgtcaatttgtacaggttattcaagacaactgaagcactcatatcccgacgcacatcgattacgatgcgcatcccatcacgatcagattcatcgtttaaatcggtaatcccttcaagccgtttgtcacgggctaattcagcaatccgttcgaccaacttggccttattaaccatgtatggaatttcagtgacaataatccgttctttgccgttcttttggacctcaacgtccactttagcgcgaagggtgattgtccctttaccagattcatacgcatggcgaataccagatttacccatcactaacccaccagttggaaaatcagggccaggtaaggcatccatcaaatcagcggttgtcgcatctggattatccatcaagatgtgtaatgcgctaatcacttcggctaaattatgcggtggaatattggttgtcatcccaacggcaatcccagtcgccccgttgacgagtaggttcgggaaacgggctggtaaaacagcgggttcgcgttctgactcatcataattcggtacataatcaattgtattcttattgatatcacgtaacatttcgacagccatcttgctcatccgagcttcggtgtaccgcattgcggcagcaccatcaccatcgacagagccgaaattcccatgaccatccactaacatgtaacgataactaaaatcttgtgccatccgcaccattgcttcataaatcgctgaatcaccatgtggatggtacttccccataacatccccaacaattctggcagatttcttgtaaggcttttcgggagtgacccctaattcattcattccgtataaaattcgacgttgaacaggttttaacccatcacgaacgtctggtaaggcacgcgcaacaatgacactcattgcatattccaggaatgatttacgcattgtcttagataaattgacgttttcaatccgaccgtcttggccaatttcgtttgccattaatctataaacccctctcagtcagtctttcaatgtgtccgtttaagcggcgaacacgctatgcatcgatgctctttggatccatgtaaacggcattttcttcaatgaaaatccgacgaggttcaacccgatcgcccattaacatttcaaaaatttgatccgcttcttcggcatcttcaacgttaacccgcaacatgcgccggttttcaggatccatggttgtttcccataattggctagcatccatttcccctaaccctttgtaacgttgcacttcaggtttaggacttggttggagcgtccctaacacttcttgtaattcttcatcagaatcaatatagcgcatcatcttcccttgtttaacacggtacaaaggtggttgtgcgatatacacgtaacccgcttcgacgattggtcgcatgtaacggtagaacaacgttaaaagcaacgtccgaatatgcgcaccatcgacatcggcatcggtcatgatgatcaacttatgataacgggctttagccacatcgaatccttggccaaaaccagtgcccattgctgtaaataaggtccggatttcatcattcgccaaaattttttccatgctagctttttcaacattcaggattttcccccgaattggcaagatggcttgcgttaaacgtgaacggcctgattttgctgaacccccagcggaatccccttcgacgatgaataattctgaaatagcaggatctttactactattatcggccaacttacctggcaagtttgagatttcaagaccgttcttcttccgtgtcacttcacgagcgcgtttagcagctaaccgggctttggcagccaatgagcctttgtcgacaatttggcgggcaatcgatgggttttccatcaagaacttcgtgaaatgatcagagaacatccgatcagtcaccgtccgtgcgtcggcattgcctaatttcgtcttcgtttgaccttcaaattgaggatccggatgtttaaccgagacaaccgctgttaagccttcacgcacatcttccccagaaaggttcgtgtcgttggcttttaagatgttttgcttggttgcgtagtcattaataacccgcgtgagcgccgtcttaaagccagattcatgagtcccaccttcgtaggtatgaatgttattggcaaaggtcatcaagttcgtccgataatcattcgtatattgcaaagcaacttccacggtaatcccgttttgttcaccttcaacatagattggttcgtctaaaagggtctcttttttgtcgtctaaatattcaacgtaactcttaatcccaccttcatagtggaattcaagtttttcatgtgtttcagcccgtttgtcggtgaacgttaacttcaagcctttgtttaagaaggccaattcccgaatccgcgttgttaaaattttatcatcatacaccgttgtttcagtaaagatatcagcatcagggacaaaatgaactttcgtaccatgttcatgggctggtgcgtcaccaatcatcttcattggcgtttgcactttcccccgcttgaaatcgatgtagtagcgtttaccgccttgagtaacaaccgcatctaattccgttgacaaggcattaacgaccgaagccccaacaccatgcaacccaccagatactttgtatccgccgccgccgaattttccaccggcatgcaagattgtaaagacggtttcgagcgcagacttaccagtcttagcttgaatcccaactggaatcccacgcccatcatctgtaactgtaatactattatcgggttcaacaaccacgttgatttctgttgcaaaaccagcgagtgcttcatcaatcccattatcaataatttcccaaaccaaatgatgcaacccttgggaactcgttgtcccaatgtacatccctggtcgtttacgaacggcttctaggccttctaacacctgaatttgactggcatcataagatttagcgcgttcttcttttgcttccatttgtgcttctgtctcttgattcatttgatcatctgccaagaaaaaaacctccgtttgatcgttttttgactaatttgctgctgcatcggccactgtcacggtgccgtttgtcacggtaaacacccgtggcgcactaataatttcttttttgacattttcaagactagttgtcgttaagaacgtctgcaccttattctggaacgttttcaataagtgtgtttggcgtaaatcgtcaagctcggacaacacatcgtccagtaataggacgggatattcaccggtttgttccttcattaggtcaatttccgccaatttaacacttaacgcggttgtgcgctgttggccttgagagccaaacgattgcacgtccttaccgttaaccaaaaataacacgtcgtcgcggtgcgggccaaccaatgtcgtgccctgttcgacttcccgtgtttggtgcgactcgtatagggtttgaaactgttggtataaaccttcggcatcaagtaccaactgctcatctggaatctgactttggtatttaaacgtcaaaacttcccgctctttggtaatctcttgatgcaacttctgcgcccacttctccatctgttgcagaaattcacggcgagcaaccgtgacttccgcgccataagcggctaactggtcggacaatacgcctaaatacactaaatctttagcttgacgtcgttgtagttgcttcaaatactgattccgctgtttcaaaatcgacttgtattgcgaaatgttatacaggtacttcgcactcatttgaccgaattccatatcgataaagcgtcgtcggacagctggcgagcctttcacgatattcaaatcctccggtgcaaacaagacgacattcaattgaccgatatattgggataacttagcctgttctaaatgattgaccttcgcttttttacctttttgactgaccaccaattctaatggtgtgtggccagtttgccgttgtaccaagccggtaatctttgcgaattcgccatcccattgtatcagttcacgatcattattcgtccgatgcgaacgagccaaagccaacacatagatggcttctagcaagttcgttttgccctgcgcattttcaccaatcaagacattgatatctggcgagaaatggacgtccacttgctcgtaattccgataatgatcaagttggagttcacttaaatacatagtcgcctacaatctttcttgttgtttaatgacaaactggccgttatcgggcacctcaacgacgtcttccagatataacttccggccgcgacgatcatcaggttctccgttcactaaaaccgttgtttcttttaaaaaccattttgcttgcccacctgtttcaatcacaccggcctctttaaggagttgcccgagtgtcacaaactcagcttcaagtttaatttcttgtgccatactcaacccaccattcttaacgatattaattactgcgctaataccgatctgttataccttacaattatagactttttttgccttaaaaacaaataaacacagctaaaatgctttctgagcgtttttaagtgctttaaccttatcctacttgttttatccgaaatcgctgtaaacgaatttattttaattttagcgcaaaaaaaaacgccccatttttaaatgcggcgttttttgattattaaaatgtccgaactggtgtgattaattgaatgtagtgttcttgatcttcacttgggaccaatgtaaatggccgtaaagctgccgtaaagttaatcacgatggttgtttgaccaaatgaacgtaaagcatccttcatataatctgggttaaatgaaatttcgagatcttcgcccgttaggttttcaaattgaagggcttcttcaacattcccaacgtccggtgagttcccgtagatgattgccgtgttgtccgttgtattcaatgtcaaccggacaacattgttccgactttcatgagacaacaatgatgcccgttcaatcgcagctaataagaccggtgcattgaattcgatttgtgtacttgaagaagttggaattaaacgtgctgtgtcagggtaatttccttctaacaaccgagaataaaaggctaagttaccggctttaaagagcacttggttttcagcaatccgaatttcaacggtttcaacttcgtctgctaacgttcttgaaagttcaattaaactcttcccaggaataatgacatcgtagttcccatcacttggtactgaaacggttaattttcgttgtgcaagtcgatgactgtccgttgcgacggctaacatttcgccatcttttaaaaccaaatgaacccccgttaagattgggcgactttcttggttagaaacagcgatgacggtttgatgaattaattgtttaagcacatcagtactgatactgaacggattttgtcccgcaatttcaggtagatgtggataactattagcatctaagccattaattgtaaattctgatttacctgaacgaatggttgtttggaagttgtcaccaacagcaatcgtcatttgatcttcaggtaattttttaacgatttcactaaagaagcgggctggtaaaacaatggcacctgcttcttcaacgactaattgattcttttcatcattactagcaagggttgcttcaattgaaatatcagcatcactaccggttaaggttaagccttcttgcgaaagcactaatttaagccccgtcaaaataggaatcgttgttttagctgaaatggcacgttgaacatcattaagggttttgatgaacacgttgcggttaattgagaatttcatggatgttaaacctccgaaggaaaatagatatatatattataaaagaattttaagtaatagtagtagggcctgtggaacctgtggataacatagaaaagcaaaagagtgtctagttttccacttgtggataagttgagaacaactcttaggataactttagcgtttatccacagcctatatttagccttttaaggtattcttcaaatctaagatggcatcttttagattttgatcactcgttaaagcttggctaattcgttcatgagcgtgcataactgttgtatgatctttaccgccaaattcttgtccaattttgggaagagaactgtcggtcatttcgcgggccaagtacatagcgatttgccgtgggagcacaatttctttaacgcgcttgcgcccttttaaatcagtgattgaaaggctgtagtacttagcgactacggattgaatcttagcaattgaaagttgactcgacttcccattgagtttcaagcctttaagggcatcggcggcaagactagttgtaatttcagcattttgcatggttgcataagcttgaacccgaaccagtgaaccttcaagttcacggacgttggaatcaatttgaccagcgatgtagctcaaagtatcttctgggatttcgaggcgttctgtgtcggctttgttccgtaaaatagcaattcgagtttccagatcaggcggcgtaatgtcgacggacaagccccatttaaaccgtgaaactaagcgttcttggagcttaggaatttcattaggtaaacgatcagatgttaagacaatttgctttttatcattgtagagatcattgaaggtatggaaaaactcttcctgagtcccttctttatccgcaaaaaattgaatatcatcgaccaataataaatcaacgtttcggtattcttggcggaatttttcttgattcttcgtttgaatcgaattgatgaagtcgttggcaaaagcttcactcgtcacatacttgacgtttgtgtcaggtttagagagtaacagctggtgaccgatagcttgcatcaaatgggttttacctaaaccaactccaccgtataaaaaaagtggattatataaaacaccgggttcttctgaaacaacgagtgctgcagcgtgggccatctgattgcctttcccagtcacaaacgtgtcgaacgtgtatttactatttaaatgcgtttcacgtaaaaaggttggggtttcagctttggtgaggctgcgttcttcagctggtttttcagcttgaagctgctcggcttcggtaggtaacagaaaaataggggtcaattcaatctctgcgaattcgtaggccccttcaacgaccttagtggccaagttactttcccaatactctttgtgtaaaggagaaggcacttcgatcagtatttcattggctctaaaagcaagcggtttggcggttttaatccaagcattaaaaccgacgggtgttaaatcattttggaattcttcccgcaaatagttccaaagttcctgaagatcaggcatgtagcgtgtcctcctcacgtaaaataaccactttattgaaaaaaagttcaataaagaaagactatctacattctagcattctaaaaaaaagttttccacaacaagaacaaaatccacaggaatgaattaaaaagttatccacttgaacacacgaccggggataacttttagtggggactgtggaaaacagaaaacaacaaacgattatcgcacttatccacaaaaaagtgtgtgtatctgatgcttgctattaaaaggttttatcaatttgtgcacagcttgaaaatagcttgtggataacatagtaacaccctgtgattttctggataaatcagcaagtaatctgtgcgtgacaaaaatcggacgattcggtataatcagttatccacaagaaagccaatgaattattttttgtggataagaatatttattctgtttttttatggaaagtgttttaacttctatagaaatatgctattatattttagtgaatgtcgtaggtggtatttatcacccgttgtttctcagatatgaaaacaatagacacagtcaattaggaggtgccagtataatgactacaaagagaactttccaaccaaagaaacgccataaagaacgtgttcatggtttcatgaaacgtatgaatactaagaacggtcgcaaggtacttgcaagacgccgtgctaaaggcagaaaagtattatctgcataggccactgatgcttcagtggttttttttattatcctcaattaattaaatgaaatgccggagtgaattatgagaaagtcgtaccgcgtcaaaaaagaacaggatttccaaacggtttttgaagcaggtcattcagttgccaaccgcaattttgtggtttatcaattagaaaaacctggtcaaaagcattttcgggtgggcctgtccgtaggtaaaaaagtgggtaacgcagtgatgcgtaatcaggttaagcgttacattcgccagagcttgttggagttgaagccagagttaccacagactgtcgactttttagtgatcgcaagacgtggcgctaaccaactaacaatggcggaaaccaaacagaatttaatgcacgtcttaaaactagcaaagctattaaaggaagaagcagattctgcttctgaataagtgagggattacagtgagttcaaaaaatcgcaaacggctattattagtggccagtctattcttgttcatgctaatcgcagcggggtgtagtacatcaccagttgatagtagcagtactggcttctgggatcattatgttatttataacttttcccgctttattttatggttagcagacatctttggtggcagttatggttgggcaattgtggccttcaccatcatcattcgggtgattatcttgccattaacttggtggcaaagtaagagcatgctcaaacaacaagaagttgcaccagaaattcaagcacttcaaaagaaatatgcttctaaagatgctgagacacaacagaagttacgcgaagaaacgcaaaagctatatgctgaagcgggcgtcaatccagttgtgggctgtttaccactagtggttcaaatgccagtgttgattgccttgtaccaagcaatctatcgaacagctgctttaaagagtgggacgttcttatggatgcaacttgggaaagctgatccttactttattatggctatcttggctgcgatctttacatttgcaacatcgtatctaacaatgatgtcgcaacccacgaagaatgctgcgtcatccgcaatgttgtgggtgatgccaatcatgatttttgtgatggccatgaacatcgcgtctgctgtttcaatttactgggtggtaacgaacgccttttcagtgggtcaaacaatggtgattcaaaatccatttaagattcgccgcgaacgcgaagccaaggaaaaagaaaagcgtgatcgtgaaaaagcacttgctaaagcacgtaagaaagcaactaagaaacgttaatttccaaaattaaaagaccaatcataatgaattttcattatgattggtcttttttagaataggtaataggcagcaagtacaagaggaattgcgatagcgcagacgacacaaacggcaccaataagtaacccgcttttatggcggttaatcgttgtttttctcagcaagaatcgggatccaaaaaaataacagaatggtaaaaggatgaggggaacattctgagccacaccttcgacaggtggaaaggttagcattaaataatctaatagcaaataaaggagtgttgttaatataaaaagaaatagtttcaatggctaatcctccatagcgctagattaaaaaatagaaattcagatagataaattgttaaaattggttctaaaccgttttcttaattttatagtagcatcatgattggtaataatcgataactaatttcaagactaataatcattcaaaaatctttaagaataaaaaaatcgtaaccgatttggttacgattttttgctgtttaatagtctaattgtttcaaatgaaggaggaagtgctgatcatcaatcggttttagatgataaagcactagaattttacgcgttaactttggttcaatcggtgcagcatcgtcaaacatatggaagtgatcgaaaaaggctgtattgacttgttcgattaacgttaaaatgccggcactccctaaatcgaacccaagatggtcggtgtctgataattgactcgccttaatatgggttaagtattggatcagttcgggtcccattgccataattttatcgggcacttgggtcgtttttaacagtgtttttaaatctgcgattgtattagcgggtacttgttcaatcgtcatcataaacatcgcctttctagcagctatgtatctgcttacattcctaatttaacagatattatcaaaatgtctagtggatctggttgaattaatcgcgctttgcgcgaaatttcgctataataagtgcaatcgtttaaaagtggaggataaagagatgacctattcagaacaatgggatttagaaccgatttttgccggggggattgattcaccagcgttgacgcaacgattggcggatttgactgcacaaatgacgcccttattagaagcggtccagaactggacgtttgcgacagatcagccaacatttgcaacgctaacgcaaatcactgaacagttacaagcgattgaagcgggtctcaagcaaacggagagtttcgtgaatatgattcaatcaacggatgaacgcaatccgcaagttgcaccgatgatggggcggattaatgcgcttgaaaatgatgcgaatcagattgatgtcgcactcacaaaaaaattggtcgcaatgtcagacgcagattttaaaaccgttgtatcgacacctgccttacaagcgattcagtttaatctaaccgaaaaacggacgaatggtgctgaacttttggatgaagcgacggaaaaactaattaaccagttcgcgttagatggtttaactggatggagtgatcattacgactcattggttgctgaaattcaagtccccgatggtgagacgactttatcggcgggacaagcgcagaataaatttgaatctgatccagatcccaaggtacgccaacgcgtctttcaaaattggtaccagacttgggatcggtattcaccattattaacggatacgttaaatcatttggctggcttccgcctaacggattatcaagcacatggcacaacggactttttgaaaaagccattggcaacgagtcgcatgcaacccgcaacgttagaagcgatgtggtcgatcgttagtcaaaataaagcgccgcttgtcgattttctaaatcggaaggcagcgttaatgggcaaagaacagcttgcttggtatgatacctgggcaccagtggttgtaggtgattttcaaccgcagcgttattcttatgatgaagcagcggattttatcatgcagaactttaaagcgttcagtcccaagatggcttcggtggcacaaaccgcgtttgaaaagcgttggattgaagctgaagatcggccaggcaaacaaccaggtggttatatgactgatttacctgaaacggatgattttcggatttttatgacatttgatggcacccccaatggtgttgcaactttggcacatgaattagggcatgggttccatacaatgatgattaatgatttaccaagttggcgacaagactatgcgatgaacgtcgcggaaacagcttccacttttgctgaactaatcgtcagtgatgcgactgttaaagcagcgcaaagcccagcagcgaagattaatttattggatcagaaaattactaacgcaattgatatgtttatgaatattcacgcacggtttttattcgagcgacatttttatacagcgcgccaaaatggcctgcaaacaacagctgatttaaaagcactcatgctagccgctcaaaaagaagcctatgcggatgcgttgactgattatgatccgctattctgggcggacaaacagcatttcttcttcgatgacgtgccgttttataacttcccttatacgtttggctatcttttttcgatggggatttatgccaaggcacagacaatgcctgattttgaagcggactatatcgcactattacgtgatacggccaatatgtcgactgaagcattagcgcaaaaacatcttggggttgatttaacccaaccggatttctggcaagctgccgcggatagcatcgctaaagatgtacaacaattcctagctttgacggcggactatctcagataatgacatgctatttttaaattggtatatcatggtataataaacgagaatcgggcgctcacactagttggagtgaccaaattgatcggaggttttgaaatgccaacatatgaaggtagcgatattcaagcagcggtaaatgaagggttgcaagctatgcatctaacgcgtgaggaagtgtccgttgatgtattggaagccggcaaaaaagggtttctcggttttggtcgccgcttagcagttgtccggctaacgccaaatgaacaaccaagccaagttaaacaaagcgccccagccccagttcaagagctagttgaaccaacgccaacagacaatttaactagtacgccgcaaaagcggaaaagtggtgtggaaacggaagctgagttaagcgcctatttggaagccatcacggctcaaattggcacaccggtcagcattcatgtaactcacgaccatcggagtacgacttatcatttgaagaccgataaagaaggcttgttgattggtaagcatggtaagacaattaatgcgctccaatatttagcgcagacttactttgatcatcatatgaagggcaagcaaaccattatcctagaagttggtgattatcggcagcgaagagcagcgattgtcagccaccttgccgataaagcagcccgtgaagtcgttgcgaccggcaaaccagtctttttagaaccaatgccggcttttgaacgcaaaattgtgcatgggcatttagcaactaatcaccatgttcaaactcattcagaaggccaaggcgatcgccggtcaattgtggtggaattagcgcgcacattttaggtgttgtgaattgacgctctaaaaaaatcgtgtataatgaaactaattaaatatcgataaagtagtgaaagtgctttgtccaccccttacacaatgacgggaggggtggacgctaagcgctttttttatgcagctatttcggaaaggaagcatttaaaatgccaacgacagtcacagaatttgatacgattacggcgatttcaacaccacctggtgagggggcaatttcaattgtgcgtctttcaggggatgagagtttagccattattaaacgcgtttatcgcggcaaagatcttgatcaagtggcgagccataccattaattatgggcacattatcgatcctaaaaccgacgcagtagtcgatgaagtcatggtgtctgtcatgcgcgcacccaaaacgtttacccgcgaagatgtgattgagattaattgtcatggcggaattgtcgcaacgaaccgcatcttacaattattaatgagctatggtgcacgaatggccgaaccgggtgaattcacgaaacgagcctttttaaatgggcggattgatttaacccaagctgaatctgtgatggatctgattcgggctaagactgatcgggcgatgcaagttgctgttgatcaattagatgggagtttaacgcacctgattaagaatttacgccaagaaatcttagaagtattggcgcaagttgaagtcaacattgactatcccgaatatgataccgatgaaatgacgacgcggattctacttgaaaaagccgaacttgtgaaagcgcggattggtgaactacttcaaacggcacaacaaggaaaagtcttacgtgaaggcctagcaacggccattgtcggacggcccaatgttggtaaatcaagtttgttgaatcacctattacatgaagataaggcgattgtgacggatgttgccgggacgacgcgtgatgttttggaagaatatgtcaacgtccgtggggtaccgctgaagcttgttgatacggcaggaattcatgataccgaagataaggtagaaaagattggggtcgaaagaagtcgcgcagcaattaccaaggctgacctgattttattagttttaaatcaaagtgaaccactaacggttgaagatcgcgagttaatcacggccaccactgataagaaacggatcattattttaaataaaaccgatttaccgaacttgttagacttaaatgaactccaaacattggtgaatgcggatgaagtaattcaaacttcaattttaacaagcgaaggggtgaccgatttggaagcccaaatcgccaaactcttcttcggtgggattgaaaatagtcaaagtacggtcatgattactaatgcccgccaaattggtctattaaaccaagcacaacaatcattagatgaagtcatcagtggaattgcagctgggatgccagttgaccttgtgcaaattgatatgaccaactgttgggataagctcggtgagattaccggggattcagcaccagatgaattgattacggaactctttagccaattctgtttaggtaaataggtcttgaaccatattaaaggagaacaaaatatgcgagaatatgacgcagcgcactacgacgtgattgttgttggtgccggccatgcaggttctgaagcggctttagctgctgcacgaatgggccgcgaaacattactattaacgattaacttagacatggtggcttttatgccatgtaacccatcattgggtggtcctgctaaagggattgtcgtccgtgaaattgacgccttgggtggtcaaatgggccgcaatattgataaaacatacattcaaatgcggatgttgaatacaggtaaagggccagctgtccgcgcgttacgcgcccaagctgacaagcacgcttatcaccggacaatgaaacggactatcgaaacgacggagcacttaacacttcgtcaagggattgctgaatcattgatcgttgaagacggtgtctgcaaagggattgtcactaacactggtgcccgttacagcgctgatagtgtgatcttaacggctgggacagcttctcggggtaagattattatcggcgaattaacctattcatctggtccgaataattcaattccttctattaaactttctgaaagtttggaagacaacggatttgtcctcacgcgttttaaaacggggaccccaccacgcgtggacggcaccacgatcgacttttcaaagacggaagaacaaccaggggataaggaaccaaaccactttagtttcgaaacacctgatagtgcttatttgaaagaccaactttcttgttggatgacatacacgaatgatacgacgcatcaagtgattcgcgacaatctcgaccgcgccccaatgtttaccggcgtaattgaaggggtgggtccacgttattgcccttcaattgaagataaaatcgtccgcttcgcggataagcctcggcaccaaattttcttggagccagaaggccgcgaaacagaagaatattacgtcggtgatttctcaacctcaatgccagaagaaatccaacacaaaatgattcattcgattgaaggcttagaaaatgcccaaatgatgcgtcctggttatgcgattgaatatgatgtcgttgaaccatggcaactaaaaccaacccttgaaaccaaagtggttgaaaatctttatacagccggtcaaatgaacggcacttcaggatatgaagaagcggctggtcaaggcttgatggccggcatcaacgctgctctgaagcaaacgggccgcgacccattcatcttggaccgcagtgaagcttacatcggggtcttaatcgatgacttggtcacaaaggggacgaaggaaccttatcggctattaacctcacgtgcggaataccgtttgatgcttcgtcacgataatgcggatttacgcttaacagaaaagggtcatgcattaggcttaatcaatgatgatcgctttgacagctatgaagtgaaaaaagcagccgttgaagctgaattagcacgtttagcaaccattcgcttgaaaccaaccccagaaatccaagcctttttagcggctaagggtgaggcaccacttaaagatggtgttttagccagcgacttcttaaaacggccagaagtaaagtatgctgatttaatccaatttattccagcagtcgaaggcattgataaccgcgttgtggaacaagttgaaattcaaatcaaatacgcgggttacatcgataaggaaaaagctaaaattgcgaagttaaaacgaatggaagctaaaaagattccagccaatatcgattacgatgcaattgaaggccttgcaacagaaggtcgtcaaaaattacaaaaaattcaacccgaaacacttgcgcaagccagtcggattggtggggtcaacccagccgatatcgggattctaagtgtctatattcaacaaggtaagattgctaaggtcaaatagcctggttgataactagtcattagatatgttagagttaagcatatattgtcaatggtagaaagccagccgtttcacatgaaacggttggctttttagagtcatgaaagaaaagtgagggaatcaagtgataactgttagtgaaatgagcttaacgctttctgggcgtaagttatatgaagacgttaatttgaagtttacacctgggaattgttatggcgtgatcggtgccaatggtgcaggtaagtcaacttttctaaaattattagaaggtaaattacaaccatcatcaggccatatctcaatgggccctaatgaacggatgtcgagtttgaaccaagatcactacgcttttgaagaatttgaagtgttagagactgtgattcaaggtcataagaagttgtatgaagtgatgcaagctaaggatgccctatatgctaaagctgatttcactgaagaagatgggatgaaagctgctgatttagaagctgaattcgctgaaatgaatggttgggatgctgaatcagaagctgctcaattacttcaagccttagggattgatgaatctttacaccatgtgaagatgagtgaattgatggaagggcaaaagattaaggttttacttggtcaagcgctctttggcaaacctgatatcctattattagatgaaccaacgaatgggttggacagtgcctcagttgaatggttagaagatttcttagcagacttcccgaacatcgtgattgttgtttcccatgaccgttacttcttaaaccaagtctgtacaatgatgtgtgatgtggacttcggtcgcatcaagacattcgttgggaactacgacttctggttagaatcaagtaagttagccgctaagttacaatcaaacgttaacgctaaaaaagaagaacaaatcaaagaattacaagattttatcgcgcgttttagtgccaatgcttcaaaatcaaaacaagccacttctcgtaagaaacaattagaaaagattacattagaagatatccaaccctcttcacgtcaatacccattcattaagttcgatttcgaacgtgaattggggaatgatcttttacgggttgagaatgtttcaaaaacaatcgacggtgttaaagtgttagataacatcagcttttcagttaagccagacgaaaaagcagcaatcgtttcacgaaatgacgttgcgacagctgtcttaatgcaaatcttagcaggtgaagtgcagccagatactgggacagttacctggggtgtgacaagtcaacaatcatacttaccaagagatacgaactcagccttcaatgatgatcaactcatcatcttagactggttacgtcaatttgccgctaagggtgaagatgacaatactttcttacgtggtttcttaggcaagatgcttttctctggagatgaagtcacaaaagaaatcaatgtcctttctggtggcgaaaaagtgcgttgtattctatcgaagattatgttgcaaaaatcgaatactttactattagatgatccaaccaaccatttggacttggaatcaattacttcattgaatgatgctttgatcgatttcaagggtgctttagtctttacatcgcatgatcatcagtttattcaaacaattgcagatcatatcattgaagtatcagcgaacggtgttgtcgaacgtgctgaaacgaactatgatgagttcttagcacatccggaattacaaaaacaagttaaaaacctctacgtttaatagtagaaaaacgaaggcccctagtatagctaagggcctttttttattgttataagataattattatttatttacagaaaatccttgcatcacgggttgcaagttggtatactaataaagttgtcaaaagcgagctgattagtgataagcagtatcgtcaattaaataaaaagttttgaaaaacacttgttatttaattgaaaacatgataacatattatatgttgcttaaggagttataacttctaagtaataattaattaaaaatagttgttgacagacgataagttgtgtgatatacttaaaaagctgtttcaacacagtagatctttgaaaactgaacaaagtttcgacaaaccaaatgtgttcctaataataaataattgtagtatagcaaatatttttcaactattaagatttaatcagtaattttaatatttcattgagagataatgcgctttctaaatgaatacggtatagttaaggtaatgaaaagtagggggttggggacgtgctgactttatcacatttatccaaaagtttcggaacgatgctagcggtcgacgatgtttcatttacggttaagtcgggcgaaatattaggcttaattggtcaaaatggagctggaaagacaacgacctttcggatgatcttgaatttcatggcaccagatacgggaactattctctggaaaggtcgcgcgtttaccgctgcggattatgaccaacttggctatttgccagaagaacgaggattgtatccaaagatgaccgtggaacaacaaattttgtactttgcacagcttcgtgggcgcagcatcgcagacatcaaaccacagattgatgagtggttggtgcgctttggggtgaaaggtaagcggactgataaaatcaaggatctttcaaagggaaatcaacaaaaagtgcagttgattgcgactttgatccatcaaccggaactcattattcttgatgaaccctttagtggactcgatccagtgaatgcagaacttttagaagaaggtattttatggcttaaagaacaaggttcagcaatcattttttcgagtcatgatatgacgaatgttgcgcggattagtgaccggattgtgatgttgcgcgatgggcaagtggtgctcgccggtacaatcgatgaaattcggaatcagtttggccgaacgcaattattcttagaagcaccgttagcacgcgaaactttagcaaatatcaacggtgtttcacgtgtaacacagcacgggcagcggtttgaattaactttggcagacgaaacggttggtaaaacgattttcgacttagcgacacaaaatggctatatcctagagtttagtcaacaagcaccaacgctcgatgaaatctttagaatgaaagtggaggaaggccatgtttaagtttaaggtgatttttaaacaagtatttctaaagaatattaaaagcccagcgtatctaatcatgattttgatgccaattgtgatgctcgggattacgtttggtgtgagtcgcttgatggatcatagcaaagaacccgttagaattgctgttttggcgccgcaaccagcagaacagagtgaattacagcagttaaaaggtaaaacatatcaaatcgatcagcagattacgactcgggaacaagccaccaaagcgctccagaaagagcgaattgatggctatttgttgttgagtgaggaaaaaggacagacaatcagtcgctactatgaacgaaaagatagtccatcatttgatgcgagtgtcttagagaatcagttaaatcagattcatttagtagctttggcgcaacaagcaggcgttgcacctgaacagatccagaaattgatgacgccaactgtcattgcaccagtgacggttaattaccagaatggtcatgaaaagatttcccaggaaaacactaaagaagtgggccaaattatttcaattggaattacggtcttaatgttcatctttatcgtgaattatgctggaatgattgcccaagaaattgcgactgaaaaagggtcgcgaatcatggaaatcattctatcaagtgtttcgattgaaattcaatttttcgcgaagattgccgcgatattagccctattactcacccaaattactgtctatattttagttgggattgtcgggtttcagtttttgaaacagcaactaccgttagcagagttattgccgattattcgtcgtgctttggttgcgccagcaatgtggtatgcaggagtctttttaattattggggtattactctacaccgtattagctgcaatgttaggcgctgttgtgtctcgaatggatcaggtacaacaagccatttcgccattgattttactgggcacattaagttatttgggtggctttgtactggcatcacagaccgatattccattattgcgggcggtgagctatgtgccattgttttcacagattatgttacctgtgcggctggcaaacggtgatgttggcgcgttcggggctagcatgggactcttcatagccatggcgacactaattggactgacttatttagcattaattatctatcgcatgaatattctagtttattcggataaaggtgtttttaaagcattaattgccacctatcagcaactcaaagaatcgcgccagtagaagatttttacaactaattaaagcggattgatggtatgatagagccatgtgattttagtagcaaggagagcgattgaacgatgcaaaaacgatgggtaaaattcggattggcactcttaggggtgacactggtattggcaggctgtcaaagtaagccagcggacaaagaaacgttggtcaaaaagccctatgaaaaaagtgattactatctcggaacgatttgtacattgcgaatctataataaagacaaggaagccgtgctagataaggcttttgcgcggattaaaaagtccgaaaatcaagcaacgttaaccaaatcaggttccgaattggataagattaatgataacgccggtgttaaacctgtacaggttagcaaagatatgtggccactaatggaaaaagcgttacattatagtcaagaatcggatggcgcgtttgatatggccattggtgcgatcacagatttatggcaaattgggttaccaggcgcgcgggtgccagcacaagcagaaattgaccaagcgttaccattagtcgattatcatgacgttgttttgaataaggccaaacgtacagtttaccttaagaaaaaaggcatgcgacttgattttggcgggattgctaaggggtacattgccgatcaagttaaacaagtttttaagaaaaatggtgtgacatcagccgttattgatttaggtgggaatgtgattgttatggggcattcaccattagggaagaacaaaccatggacggtcggcattcaagatccgaaaaaggcgcgtggagaatcagtcggtacgattaaaggccgtgatatttcggttgttacggcagggatttatgaacattatctaaaaaaagacgggcatacttacatttatctctttgatcgccatactggctacccatatgaaaataacctagcgagtgtcacaattatctcgcctaaatcagtagatggagatgccctttcaaatgctgtctttaataaggggattgtcgaaggcatgcagctcatcaacaacaaaccgaagaatatccaagccatcatgatcacaaaagataataaaatctatctatcaaacggtttgaagaagacgtttaaacttaaccaagattcaaattatcaagttgaaaaacaattaccaacgaaatagccgctaaattgcggcttttttgcaattatgggggtcaaagcattaacggaaaaagtggcaaaatgttaaaattgggaaagaatctgcttttgaggaggacaatgatgacaaacgtgcgaatgcaagatgatttttatacggcagtgaatcaagaatggttaaaaacggctgaaattccagcggataaaccagcaacaggcggctttgtcgccttggttgatgagattgatcagcaattaatggctgattttgctaagatgtcgaccgcaaagaacgcattgttacaacattttctagattattacgaactagctgcggactttcaaacgcgggatgcactcggtatgaaaccgatcctaccaatggtagcccgggtgcaatctctcgatagtttagcaacttacaatcgtgggttagctgattgggtactttccgggttaccaacaccatttggcttatctgtcgatgctgacatgaaagacacagcccatcacgcgttgtatgcggaagctagcgacttaattttgccagataagacctattatgaagctgacaatcccaatgctgaccatttattggccgtctttacggatatgatggttcagctcttgcagaaaattgggattgcgcccgttgatgcaacgaagacggttaaattagcgttggcatttgatcggtcactggcaccttatgtgaagagtgccgaagaagcagcggattacacgaaactctataatccacagcctttgagtgattttatgcaacaacaaacgacgcttgattttccacgtttatttagcaaggtgctacctgttcaaccggaaaaaattatcgtgacggaaccgaagtattttgcgcaactgagtcagcttgtgacagacgccaatttcgaaacgttcaaagcgtggctgttagtcatgacagttcgtagttggagcggttatctgaatgaagaggcacgccaaattagttcgctctatagtcgtgcgttatctggtagcaaggaagctcgtccacaacaaaagagtgcttactaccttgccttagggatgttcaatcaagttgttggcgattattacggtcggcaatacttcggtgaagcagccaaggccgacgtccaaaagatggtccaaaaaatgattggtgtttatcaaaaacgccttgaaaaaaatgactggctaaccgaaaaaacacgccaacaagcgattgtaaaactcaaccaccttgggattcatgtcggttacccggatcagattgcccctatttttgcgaagttggtcacagtacctaaagcagaagatgggacattatttgaaaatacagctgactttattcgaacgattgaaacggaaaattttgcgaaacttactcaaccggtggatcgtaataagtgggaaatgggcgctgccacagttaatgcctattattcaccttcgaagaatatcattgtctttcccgcggctattttgcaagcacctttttacagtttagaacaaagtagcagtgctaactacggtgggattggtgcagtgattgcacatgaaatctcacatgcttttgataataacggtgcgcaattcgacgagtatggcaacatgcataattggtggcaagaatcagatttagctcacttcaagacactttcggaagaaatgattgcagaatttgatggcctagaatatgcaggcgcaacagttaacgggaaattaactgtctcggaaaacattgccgatgcgggtggcttgagttgtgcccttgaagcagccaaagaagaacctgatgttgatttggcagccttctttgtcaattgggcaacgatttggcggatgaaagctacaaagcaatatcaacaattattgttaaatattgatgttcatgcaccaaacgcgttgcgggccaatattcaggtccaaaacttggcagccttttacgagacatttaatgtaacgaaagctgatcagatgtacttagcacccgctaaacgggttgcaatttggtaaattaaaaaggtgcgccacaattgtgacgcacctattttagtagtgatgggggataaagaaatgtcagaaaaaaaacgcatgattaatggtcaaatttatcgggcgaacgattcagaattgcgagccgatatgaaacacgcgcgcgtacttactcggttgtttaatcaaaccactgaagaacaacaagattaccgacgcgaattaaccaagtctttatttgcgaaaagtggctcagatttatatattgagccaccatttagaactgattatggttgccaaacacgcattggtgagcatgtgtatatgaattacgattgcatcattattgatgtagcaccagtgacgattgggaaccacgttttctttggacctcgtgtagggctctacacagctggtcacccaacgacggcacaagaacgccgggatgatctggaatatggtaagccaatcaccatcggggatgatgtgtggattggtggcaatacggttgttaatccaggcgtgacaattgggaacaatgtggtgattggttctggatcagttgtgactaaagacattcctgataacgtgattgcagttggtaatccatgtcgggtactccggccgattgatgaggcagaagaggcctactgggcgcagcaaaaagcaagttattttgaagcccttgctaatgaataagtttaccgagtagtgttaaatggagtagtcatcactaacaaagcactaagctaaatatcagcaaactaccgagaaaaagccgctagtactctataaaaagggttctagcggcttttttaaatgtttggtggatcaaactggcagcaaatactattcagaatgggtcaaaccgtaataagggttaattacgattggttttcatcagtactgcggtgccatggcttttgtaatgcttggacggcttgagcgatatctgtggcgtgggtgattgctgagataacggcaactccatccacggtagtctttgcgacttgagcaacgttttcttggttgataccaccaatcgcaacaaccggtagttcactttgctgcgttaagaaacgcaagcgattagtgccaagtgctggtttagcatcttctttggaattggttggaaaaattggaccaatgccaatgtaatcaagtatcggttgattatgactttggtgaagttcttgttcagtgtggcaagatagaccagttattaagccgtgtgctttggccgtttcaattttatgccacgggtgatcgctttggccgacatgaataccatctgcattgatttgaagtgctaaatcgagattgttatcgataataaatgggacttgataatggcggcaaagggcttgagccgctgtcgcatactttaaaatcgcatcggaatcttgcagactaccagcacctttttcacggaattggaaacaggtaatgcctgcttgtagtgcttgttcgagaatgtttagaaaatcatccataccggtattttgggtacccgctaccaaataagtttggaacatttcccgggaaatgttagtcatgatgaacctcctgataagtccagtgattggttggtccgtggccgtgaccaacagcaatcggattagcaattgcggcttggataaaggctttgctaatatgaattgctgctttcaaaggggtgcccttagctagctcggcggttaaacaagctgaaaacgtatctccagtgccatgtgttcgtttagtagcaattcgtggtgtagttaaccattcatcttgtccatcagcgtagaggacgtaatcggcggcttgtgattgatagtctaaatggcccctttgataatgatattcttggcgcccatttgttggagttggtgggccgcttgtttgaaatcagctgttgtctttatgcggctgcccgtgagaacttcggtttcgggtaagttgggtgtcagcactgtggctagcggcaataattcagtacgtagggtatcgatggcatcgtcggcaagtagctgtgcaccgcccttggcaatcattacaggatcaagggtgagcggcccccaatcataatggcgtagattttcagcgaccgttgcaacatgttcagcatctgccaacattcccgttttgcaggcacgaattttaaagtcagtagccaatgaagcgaattgttgattgattagtgatagtggtagtggcagactgccttgaactctgtgttctggtttgatgttgctaacattaatgatatcgggaatttcttgggtggtgcgaaatcacttgcgaatggttcagctgtgattggtaagacagggatgtatcaagctggtttcttcccagtcatgatgttcggcttacctgctggggcttacgcaatctacaaaaatgctcgtccagaacgccgtaaagcaacagcttcattgatgttagctgctggttttgcgtcattctttacaggggtgacagaaccacttgaattctcattcatgtttgttgcatggccactttatgtattgcatgcagctttcacagggatttcattggctgttgctgctttcttccactggacagccggtttcgcatttagtgctggattagtcgattatgttttaagtttgaaaaacccagttgctaaccaaccgttgatgttattggttgaagggttggtcatggcagttatttactactttgggttcaactttgccatcaagaagtttaacttgatgacaccaggtcgtgaagcagaagatgctgttgatgaagatactgctggcgttgaaacagacgctactgatgataaattcatggttcaagcaaaacggatctacgctgcaatcggtggcaaagacaatatcaaagtgattgacaactgtacaacacgtcttcgattacaattagaagacactgccaatgttaaccaatcagcgattaaagctgttggtactgctgggattaacgttttagataaaacaaacattcaaattattattgggacagaagtccaatttgttgctgatgctttaaaagaactttataaccacaatacgccaatcgcaacaagtacaccagaacaagctgccgcaccagttgaagcacctgttgatagcgatattaactcaggtgaaacagatgttttctatgcagttgctaatggtgaattgatcgatattgaaaatgttgatgatccaacttttgctcaaaaaatgctcggtgatggctacgctgtcattccaacagacggcaaaattgttgtaccagttgatgggactgttatgactgtgttcccaacgaaacatgcaatcgggattaaaacaacgaacggtttagaagtcttagtgcacatgggaattgatacggttgaattaaacggcgcaccttttgcagtcgctgttgaagaaggccaaacaatcaaacatggcgacttattagcaacggttgatttgaatcaaattactgctgctggtaagaagacggcaatgatggtgatcattaccaacatgcccgctgttgattacattaagtttaacgcaatgagtaccacagttgctgcagacgcagttgccttaaaagcaacaacgaaataatgaataaataaaaagccccgcaaactgaagtttgcggggcttttttgtgttatttagttaaataatcctttgaagaaattagccatgctatcaaagagtttttgaatgaagttccgattgctttgggtgttgagcttattgaagatgtttttcgcaccactttggatattattcattaacttaccggcttgattcttgaaatcatccgaatttaaagcaccggaatcttggattttaacgagaacattaatgatttgttgtttttgattattgttgatgatgttggtgaggttgttttgttcgagttgattattgacgatggtagtaatttggttaacagtcagattattgcccttacttgccatgtcttttttggcacctgtgacggcattattcaattgggaatctgaataaccatcggtgcctttattagcctgtgtgatatcgctgagggtgctcatttcgtcttgagcagcagttacttgcgcttggttgagtgaatcgccattttcagcgaaagcggcgtaaacgccagctaaggcgccagagccatcgattggaatggcggaagtcacgtaaattgtcgcattcgtgacgccggcggttaaggccgcatttttatattggttggctgtaattgtggtgatgttgttatggccattaaaatcgataattttaacattgatgccggtattgctgtcatttttttgaattaaagcacttgagtagacacttgagttggcgttaaatgtttgttgattttgatcaagatattttacaagtgtggaaccggtcactgttagttcactgacatctgtgacattcgcggcattttccagtgtcttgagggtatcagctttttgggtgctagaaaggctagtcccaagagtggcaacgggtttgtcccacgatgtggtgctgtcggcaaaggccggttgtgcgctcagaccgataatagcagtaaatgcaatggggatgaggaacttcaatttattaaacataagcaataatcctttctcaaagcgaatgatacctttagtatagccaattcaagccgtaaagtatccgattttaactatttttaggaattaaagatgattttaaggcttttttaaggttgctgagtggggtgaatgctactaatgacccgtgtatgggttagtttctcgtagaataattgtggtcgtttagtcacccaacttaataagaagttaccggtgaataacagtggtggtaagagtgagagaccgataataaagagatagacgtcaaaatgttgttggccactagcaacagcggcatccagggtgacgcgccagagttgaaagctgggaatgacgatgaaaaataggagtagctggcgccagaagatcgcccaacggtgatgatggtcagcgacaatctgtagttgcaggagagattgaccaggtgttttgccacgccaaaaaacggggagcattaagaagtaagcaccagttgccaggcagtactgaagcatttctgaatgaatggtgggtagttttagtaatcgccagataacagcaattgcaaatgtaatgatgcctaacgcacagtaatcaacggcaagtgccaataagcgccggaagtagcccactttttgaccgcgcgcataggctgcttgatccaaactttcacgagtgggtaagaaaaaggtgaccaagggctggagataaaatccaagcagtccgccagagatgttgatcaataagtcatcaacatcaaataaccgataagggcgaggataaataccatacagtccggaaagttgcgtgagttcaaagaatagggataacgtaaaactaagtaataaggtctgtttgaaagacgttttaaagaagtaacgtaaataaatgccaaatggaacggttaaaaagatgttaaacaacggctgaatggttgccgcttgtttaagtgttgcgaggtatgaactcggttcggtccaaacgaaatgggttgagttgataaactcccggacaaacgtaaagggaactaagttatagcgaggggtggttaaatgagcgaccaccgagcgtgggggaggggaagaataattaagcagtaagcggctaccaagtagaacatgaagctgtagagaattacactacgcaggatggttagcgaaccataacgatgatagtggtaaactaacagtggaacggttaagatgattgcgacgaatgaaaaggcaattgccgcagtaatgatattgctgacgtaaaccatgatgagctcctttggtgttagatgtggttatattgtattttttaatgaacgcctgtcaaaacagggatcattgttcgttatttacgttcgtattttatcggttatatgtatcgttaagattttactgaataaaggctgattagagattttaaagttcgtcttttatattgattttgagataatttgttgctacaatagtttttgtgagttttagggtttaaatagcggatctgaagacggattcgaatagaggagtatgtttatatgacatctgtagtagttgttggaacacagtggggcgatgaaggtaaaggcaagattaccgactttttaggtcaaaatgctgatgctatcgcgcgttatcaaggtggcgacaatgcaggtcataccattcagttgggtgacacaacttaccatttacaattaattccatctgggatttttaacagtgacaaactcagcgtgattggcaacggggtcgttgtaaatccgaagaccctcgtttctgaattgaaatatttaacggatcaagggatcaacgtgagtcaattaagagtatcagatcgggcacacgttatcttgccataccattctaaattggatggcttacaagaagcagccaagggtgatcaaaagattgggacgactaatcgtgggattggcccagcttatatggataaagccgctcggagtgggattcggattgccgatttattggacaaggaactctttgcaactaaattaaaacaaaacttagacgaaaaaaatgcgctctttactaaaatctacggtgctgaaccacttgaatatgagacaatgtttgcagaatattatcaatatggtcaagaaattaaacaatatgtttgtgatacttcagttgttttgaatgatgttttggatcaaaaggggaatgtcttatttgaaggcgcacaaggcatcctcttggatatcgaccaaggtacgtatccatttgtgacatcatcaaaccctgccggcggcgtttcaacaggttcaggagttggtgcttcacggattgacgaagtggttggggtggctaaggcttatacctcacgcgttggtgatggcccattcccaactcagttagatgatgaaactggcgacttcattcgtgaagccggtcatgaatatggtactgttactggtcgcccaagacgcgttggctggttcgactcagttgtgcttcggcattcaaaacgagtggcgggtgtgacccaattatcattaaactgtgtggatgtcctaactgggattaaaacattgaagatctgtgtcgcttacgaattagatggcgaacaaatcgatcgttatccagcaagtctccgcgaattagaacgttgcacaccgatttatgaagaattacctggttgggatgaagatatcacgggtgctaagacgctagaagacttgccagctaatgcgcggcactatgttgaacgaattcaagaattagttgatttaccattagcaacatttgctgttggtccagatcgtgaacaaacaaatgtcttatctgctatctggtaggtattgctgaaaaagagtacaaaaaaagagaatgcaaagttcgttttctaaacgtgtcgttaaacacgccaacaaactttcattctcatgggtttggcaccagtcagtattatacacacattaccactaaaaagatagtgggaaaattagttggtttagaggagtcgttatggaaagagtaagtcgcttcttcgggattgaagaacaacattcaacagtgcaacgggaaatcctagcaggattcaccacatttatttcaatggtttatattttattcgttaacccgagcgttttaggtgattcagggatggataaaggggctgtttttgcagccacagcattagcaagtgcgatcgggtgtttcttgatggggttatatgctaaatacccaattgcaaccgcaccagctttagggattaatgcctttttcagttattcagtggttatcgggatgggtgtgtcatggcagacggccttagcgggtgtatttgtggcttcattaatcttcatgttggttactgtctttaagctacgggaaatcattattgatgccattccgcggaatatgaaactagcgatttcagctgggatcgggatgtttgtggctttcatcggtttacacggtggtggcttgattgttgcgaacaaatcaaccattgttggtttgggggacttctcgcaagggacgacttggttaactgttttcggcttaatcattaccgttattttaatggtccgtaaagtaccaggagcaatctttatcgggatgcttctaacctcaattgtgggagccatcagtggcctaattaagttgccaacacactttgttgcagctgcgccaagtttgaaacccactttcttagctggtttaaatcacattggcgatatcaacaccgttcaaatgtgggtcgttgtactcactttcttattagtgaccttctttgataccgccgggacattggtcggtttagctgaacaagccggcttcatgaaagataacaagatgccccgcgttgggaaagctttggtatcagattcaacggccatgttagctgggtcattactcggaacatcaccagttggggcctttgtcgaatcgtccgctgggattgctgttggtggtcgaactggtttaacggccgttgtgacgggtgtgttattcgtcttcagtttattcttctcaccattattgacggttgtcacgtcacaagtgacggcccccgcattagtgattgtcggtgttttaatggctcaatcattgaagaaaattgactgggaaaaattagaaattgcaattcctgccttcttaatcgttctaggcatgccactgacttacagtatttctgacgggattgcattgggctttatcgtctatccaatcacaatgattacagctggtcgtcgcaaagaaattcatccaattatgtatgttttattctttgttttcgtggtctttatgtacatcttaaacgtaaaataaacaacaaacgcacagccgaaagtttcggttgtgcgtttttatgtgttgctgttattaattgcgaatcacaaggatttagagccggtaaatataaaatagtgtgttacaatagtcgtaaatactagtgaagggcttaaactgttatgtaaaaaaagacaagaaaccgattaattaatggcttattagccattctgttagtggttggattagtgttggtcttcatcaatccaatccgcaaccaactggttaaaatgatggcgcatcgtcagatggacgtcacagctgctcaaattaagaaaaaccaacataaaaaagcgagctttgattttgataaggttgattcactcgatacaaaacagattgtgaatgccgctattaaaggcgatgtgattgtcttaggaaaagttgcaattccaagtgtcaagatggccttgccagtcatgaaaggcgtctcagaggacacaatggctcaaggtggaggcacaatgaaacctgatcagcaaatgggtgcagttaacaattatgctttagcagggcattctttccaaaacatctttctgccacttgaaaatgtgcgcgtcagcgataaggtctacttaacggatatggaaaaagtctacacgtacaaagttgattacaaagcttcaatcagtccatacgacgtaaaagtcatcgatgatgtaccaggtcgtaaaatggtgacactgattacctgtgataaaacggtccgcagatggtgtattcaaggtgaactcgtgaagacccaaaaggcaacaaagaaaatgttagctgttttcgggaattaacccgggaaataaaagactgccagtgagttgaaatgctttaatagcagggatgcaacagatttgttgcttgtttttgtgggggttaattcgttaaattaggtttatagcggaggtggcaaaatgtcagttgggaatgctttaaaggaagctaggatgaatgttggggtgacgcaggaacaagttgcacagaatttgtttgttacacgtcaaacggtttctagatgggagcaagataaaacattaccaaacgttcatgttttaaaaacacttagtgtgctttatggtattccaattgatttcatgtctggcattattcattattgggcttgtgctttatccagtcgctaagaagatatcaggaatggttgttagctttggtaaacaatatgttaaatataatcaaaaggctctatacgcataaacataaaaacgtcatctattggatgacgtttttatttgaaaatcattggaatgaggccacctactaagagtggttggagataaatttgaagaaactaacgcgcctaaattattcaatgaattatcagcggatgaacaagtggtactcgttaattgggtgctaacaaccttgaaaccaattaaaacttttagcagtcagcggtcatcatacgagattaaacatatttttgaacgtacaccacttggcttttatgtattaaatggtgcaatgaaaggcgcgatgttaatcgctggttatcagattaagaacgaaaaagaaataaattggacgtttaatatatccgaacgtagcatttcgcgggcctatcaacttggataagaatttccgatttagggaattttatgtaaaaaaaagagatgtgcgttgagcgtgctatatgaacgcttggccccctaatatatagggggttggttaataacctgataaaacctaggttctaagtaaaggagtggttagcaccaatgattaattttactcccaaattgcaagaacagattagccacacgataaatcctattaaatcagtattttcattaatattcatattttatggacttaacttaaccggcggaagcagcggagaaaagctctttgggtgtttgatagccagtttgccggcgcggtaaattgtttagctttgactcaactgcttggatatcatgaggacccaaaatatccatggataaacccttgggtacatcgcggcggatcattcaactacggtaaaaatcgctgcgttgaaatagtgttcttttgcttgccctagagtatactctagggactattataaacaaaaagaagccataaacaaggatcatgctacttaacggcatagcatacatgactgattaaattaaccctcattagggaataggagcataacatcatgacaaaaaacgtattagttaccggcggcaacggttatctgggtctgcacattatcttacaacttttaaatcaaggttatcacgtccgtgccaccttacgccaactcgacaaacaaaccaccgtccgcaccgccctaaaagaaaatcaggcgcaacaccgcgaaaatttaagttttgtcgccgctgatctcactcaagatgctggctgggcgacagccatgcagaacatcgactacgtgctaagtgtagcatcacccgttttttccaatgacccgaacagcgacacaactgccaccgagggtattttacgcattttaaaggccgcccaacaggcccacgtcaagcgtgttgtcatgaccgccaactttggcgccatcggcttcagtaatcacgaccaaacgagcatcaccactgaagccgattggactgatcctaacgaaaaaggcttatcggcctatgaaaaattcaaactgatcgccgaacaggctgcctggcagtttattgaacaaagtcacggcagtttagaactgactacgatcaatccggtggcgatcatgggcccagcattagacgcccacgtttctggcagcttcgatctattgaaaaatttacttaacggtcgtcccaaaatgattcccaatatcccactcaatctgatcgatgtgcgcgatgttgctgacttacacattcgtgcgctgaccgcacctcacgctggcgggcaacgttttctggctagtgctgctggtcagatatcactaccagagatagcagcactgattcgccaaaaacgaccgcaaattgcccaaaacattcccactaaaacgatgccgaacttgcttttaagcagcgctgctttgttcaaccagaccgcccgcgaaggcaatttattagtgcacgtcaatcgtcagttgagtacccaaaaagcgcaagatatcctaaaatggcagccacattttgataatacgaccatcgtattagatagcattgacacgttaattcaatatggactactgccttaaattataaatttatttttatcacccccttgacaaacacttaaaatcgcgttaaattatagaaacattataaatcaatgagaaaattaaacgctgtgataagaaaagtataattgtattcaccagttaagcgagcgtcgtttggtgcaaggacgtcaaggtgcgacaattagaaaatcatctttgagcgttcattgggggctcccattatcgagctagggtatttcgtaccaattggtgcttgtacccgaagaggctgttttcgtgagaaaatggcaaatcaaggtggtaacacgtttattaacgtccttatctgaaagtaatttttcaggtttgggcgttttttgtttatcgtgatcattcccgcgcaggatgatcgccgccattactaaagtcgacttagcaatggcaacactcatgatttaaacgtggggcaacagacgcttagtctttgaaccacatttccacaacctacaaaatttaaggagtgctgcttatgttagaggaacgtaaactcactaaacgcgattatttcgtggttagttcaatgctttttggtctattctttggtgctggtaacttgatttttccattacatttaggccagctagcgggacagaattgggtgcctgccgcgcttggcttcttagtcactggtgtgttattgccattattatccgttttagcaatcagtatcactcgttccgaaggtgtctatgatgttgggcggcctttaggtcccgtattcgcgctcttattcatgatcttgatccacggcaccatcggcccactttttggtacaccacggacagccaccgtttcctacacggttggcttagcgccactagtaccaaagaatttccaaacagttggtttattagttttctccgctgttttcttcggcttagccctctttttctcattagaggaaaataaaatcgtcaacaatatcggtaagttattaaatccagttttcttagtcttattagctggcgttttcttcttagcttttagttcaccaatgggccacgccggtgttcaacacgccaccgctgcttatacatcaggctctttcgtcaatggtttcttgcaaggttataacacgatggacgccttagctggcttagccttcggggtcaccgtagttaccgccgttcgcaccttaggcaaaaaacgcgctaacagtgtcgcgctggtcactgcccgtgccggcgtcttcgcaatggcaatgatcgccgtcatctacgttggtttgatcttcgttggcgcgatgtccttaggtaaactcaaagtttccgctaatggcggcatcgcttttgaccaaattgtcaatcattatatgggcgtcgctggtcaggccatcttagccactttgatcaccgtcacttgcttaaccacggcgatcggtttagttgcggcttttgcccaagactttcataaacattttcccaaagttagctaccgcacttggttagttctaactactctggcatcattcttgaccgctaatatcggtttaaatcaaatcatcgcttggtcaacgccaatgttgatgttcttatacccactatcaatggtcttgattttattgtcagtcgcttcaccactgttccacaaagacccagtcgtgtataaattcgttgttctctttaccgttgttcctgcttttttcgacatggtaactgcttttccagcggtcgtcagccaaagtagcttcggtaaagcgatgactggcttcgaacaggcatacttgccattcgccaactacggcttagcttggttagtccctgccttagtcggtaccgttttaggggttgccgtccacgtcttcaaacgtgttagcgcccgcaacaccgtttcacaaactaaataggtaagtcaaaaaaacgttcacttgcggtgaacgttttttattgccttgaatttatactttaagtgcaacaaaagagactcatgatatgaatccctgtaaaatggtgtttgcgaagacaaccatcgaagggagcacataatcatgagcccatacaaacatcttaccatgagtgaacgcgaaacgatattcctgatgcataataatcaggcttcactgacttcaattgcccaaacaattggtcgagcaacggcgacagttagccgtgagttatcgcgaaaatagatcggcatattcaccttctgttgctcaagagcgctacgaagctcaaaaatctcattgtggacgccggtcgctactttctgatcaccaattgcttcaattaatccggcatttattcttggatctacaatggtcaccagaagaaattgccgcacgcttaaaattagagacctcatcatttcagatcagctacaccacgatttatcgtggcatctactccggtttatttgatcagaagctttcatcacgaggtgccagaggggtgatcagaaagcttagacatcatggtaaatcgcgccataaaaaaggttatgaggaacgtcgcgggaagattcctatatcgcatacactccaagaacgacctgagtctgccaataagcggactcagattggccactgggagctggatactgtagctggcaaaactggcagatcttgtgtggtcacaatggttgaccgttgttcaagatacttaataatgcacaaagcagctaagaaaaactcagccagtgtgaccactactattcgaagactactaaaagatctgccaccagaacacttgggtacgattacgcccgaccgtggcaaggaattcgctaaacatcatcaactaactgaagaatttgggattgatatttagaggtgatatgatggtcaaaattattattacggatcaacagcaaagcaaagaatatcagttaccaagttatgggagcttaactgttacaactcaaaataataaggtggtgttcattgaacgaacagacaagactaaattagtttaatacctgattggaaaaccaaagggatgcgttactgctagtacatggcaatagtgcatccctttttaatatgttggaggtgtcagagtgtttctttttgatattgatgaggataagagcagacagcaagcagatagattattaaagcgatattggcgagtgaaacatattgcaggtagtgccagtcatttaaagagtcctatttgtgatcatgcgccaaagtcttttagcagtgataatacaaccgagaaacgggcggttaaaacactcgaggcacggcagaccctagaatacatagacgtggctttaagtaagttaacggtaattaacagggaattgctaaagatgcagtatttaagtgctggtaaattaaccatggcttatatctgcggtgaactaggtataacagcatcatcattcaagaagcataagaagcaggctttgctagagtttgccgagtcctaccctagtgaaggcttattaatattcaagaagcattgataacggggatgcagtcctgatttaggatgccatcaaaattgaattaatacttaaggagtgaagcagtatgatcattgaccgaataaaccaacaagcaagtatcaaaaacgccagaaagctgttaaagagctatggcacgattagacggctagccacggtaaatactagtcatcccttacatgagcaggctaagtgtgatttaaagtgtattcaagcggttgtaggaggaatggaggatacgcaagcatccattattaatatgtgttacttagacggtagtcataaaacaaggcaatatatagcggatacgatggggtatagcaggtctagttataatcggtttaagaatagggcgttattagcttttgccgaaagctataataatcaagagttgcttgtttataagtaggttgcgcaaaatttcgcaggctagtttatggattagtaattgaataggacaagccattattggtttatccaatgtaaacctacgtgaattagcttttgttggacataaaacctaacaaaacctaacattaatttatttagagattttagaggccctaaagaaggagtcaccgaattgatgactccttaaagatgagttagtatattacaacagcatctaatgcactgatatggtgcgtcagatacttagccaattatagaaacagtacggccgaaaattcggccctaattaactttagataccgttgattttaacgagatgttgcccaatccatctttggtttcggctaattgcatggaagcaatctgaggtaccgaaacggtagtttagaaaaaggaggccctaaaatagggcggtttgtcgaaccgtgaaataacctgccataacagatcgttctattaggtcaaaataaaatgagtacagcggaaaattccgtgctactcaattagatataaattggctcaagcttgagcagatgtgttttgatatagaaacatatggagtaacgaaacgttacccctagatattatctaggtcgaaaaatacaaccaagctaaacttgggcccgtttgaaacgtctgtccaaaactggaggcacccccttatctaatgaatacagtcgcgatttacgacggaaaccataaatttaataaaaatgaatgctaatggttgctagtatgtttttaacagtctatgtttaacttaaatcgttggctaatgaagttagtccaaattaaaaaacggccactaatctgaccgcctgcagtaagttatgtatatgccccgtgcgtgatttttgttgaatacgtgaatacggttttgaatacggtttgtcgtattcactgtgaatactaatctgctaagaagaaataaaaaagccgtcatatcaatgcctaagcacctctataacgacttatcatgtatacttgatgggtggtcaggggatcgaaccctggacccacggattaagagtccgttgctctgccagctgagctaaccacccatatgatgtctcgccttacgacttaaatatcatagcatattaaacaaacttttgtaaacagttatttgtattttttttgaataaagttactgagcgcgtaagaattaatcgttatagggattaacaatgccgttaatccagttggtaggaattgacctaattttgaattgccttctgaaaatgagtataatagaaggcaaagcatccacattcaaggaggatccgcacatggctaaaaaaatactagtcgttgatgatgaaaaaccgatctctgacattgttaaatttaatctaaccaaagagggttacgaagtctacacggcttatgatggtgaagaagccttacaacaagttgaagaggctgtcccagatttaattctattagatctgatgttaccgaagattgatgggctagaagtagcccgccaagtgcgtaaatcgcatgatatgccaattattatggtgacggctaaagattctgaaatcgataaagtgattggcctcgaactcggtgccgatgattatgtgacgaaaccattctcaaatcgagaattagtggcgcgagttaaggctaacctacgccggcaaggtacaacgagtcaatcagataaagaagcgaatgaagaaaatcacgagattaacatcggggatttaacgatccatcctgatgcttatattgtgtcaaaacggggcgacaagattgaattaacgcatcgtgaatttgaattgttacattatttagccaagcatatcggccaagtgatgacccgtgaacacttgttacaaacggtttggggatatgattacttcggtgatgtccggacagtcgatgtgacggtccgccgtttacgtgaaaaaattgaagacaaccccagccacccagaatggttagtgacacgccggggtgttggttactacttaagaaatcctgagcaggagtaaatttgccgcatgaataagaaaattcggttgctacaatcgattcattttaaaattgccattgtgttcgtattgttgctgctggtaacgttggaagttatcggcgcttcttttgtgaagcaactggaatatcagaatgtgcgtgattttaagcaatccttacaagtgacatcctatattcaaaaccaacttagtaatgagttactgaataatagtggtaatgcgaacaagaatattaaagagattattggcgatatgggcaattctgccgaaattcaagttgtcgataataagggcaccattcgaggtgtcacgaacttgaataatcaaagtaccgttggtcaaaagacgcgtaacccacgggtgaaacaggttatttactctgggcataccgaacaagaagtggcatacaatgagagtctagggagctattatacagcgatccaaccgttgacgaacccaagtggggatagtaataccgttgtgggcgccgtttatattcgggctagtatggaagatgtttacaaggggatttcgtcgattaccgtcattttcttaacctcgtctttagtcgctggtttattagggatggcattatcgattgttatttcccgggcaattacccgaccaattgatgaaatgaagaaacaagcgattcaaatggcgcgtggggattactctgggcaagttaagatttatggtcaagatgaactggggcaactcgcgattgcggtcaataacttatcagtccgggttgaagaggcgcaagaagcgtcagagtcggaacgacggcgacttgatagtgtgctcagtcatatgactgatggggtcattgcgactgatcgacgaggcaatatcacgattatcaatgaaactggccaagattttttaaatgtgacacgcgatgagttactgggccagtcattgcttaaagttttacgaatcagtgatgaatattctttgcgcgatctattagaaacgcaacaggaaatggtcttggatttctcagaacaacaagatcacgacttaatcttgcatgttgatttttcattaattcaaaaagaaaccggctatatcaccggtttagtttgtgtgctccacgacgtcaccgaacaacaaaagaatgaacaagaacagcgcgaattcgtttcgaatgtgtctcacgaattgcggacgccattaacaagcgtgcggagctatattgaagcgctgaatgatggcgcatggcaagatccagagctagcgcccaatttcttaaaggtgacccaagaagaaactgatcggatgattcgaatgatcaacgatctattgagtttgtcacgaatggatcaaggaacggcaaagatgaatctcgaatatgttaatttaaacgagttctttgggtatgcactggatcggtttgatatgatgatcaagcgggatcaagagcacaaagatgatttgcctaaactgacaaccagcacgggcaaattgccaacagatgatccgaataagaagtacagtattacacgagacttcactaagcgggatttatgggttgaaattgataccgataaatttatgcaggtgatcgataatatcatgaataatgcgattaaatattcaccagatggtggcgtgattacgtgtcgcttattggaaacacatcgtcacgtgattttaagcatctctgatcaaggattagggattccacggaaagaccttggtaagatctttgatcgcttctaccgggttgataaggcccgttctcgtaaacaaggcgggactggtttaggcttggcaatttctaaagaagtgatcgaagcgcatcgtgggcgtgtttgggttgatagccaagaaggtaaaggctcgacattctacatttcgttgccatatgaaccaattgattctgatggaggtgagtgggatgcgatttaataactttttaatgcgcgttatactgattgctgccattatcgtcagtatcgggctatcatggctaatctggaccagtaacgcgcattatgagcgccaaacggacagtcaaaccaccactaagtcaacaagtcgtaagacagaacgaaaaatcggtgatatcttcttgccgacgcaactattgtggcggacagacaatcagagtcagttgatttataactcaaaagagagtttgattccacagtttaaagcgactttaaagcttgccaagtcggcacagtttaagcaagttaagctaagcgaagacgattattaccaggcaattagtgaggatcatacattgacccttttatatcctgataatatttcgtacgctatttttaaaaaggtcttcagttatcagaataataatttaggtcaaaacgtgacattcaatcggattcgaatcacgttgggcacacagcctaagttgtggttgatgaatgatcaaagtcatcaagtgtaccaaacgacactcaatgttttttcacaagctcgtgtgaaaaaggtgcttaaaaatgccgatgtgcatttgaaagtgaccgaaaaaatgttgaatcacaagccattactctatgtggcagcggatcaaacgttgttgccttatagttatttagttaatcaacaacccgaaaattattacatcacaacgctgttgaatcaacaaaatacggataatattgatacgaaagaacaaggcaatagtgcgatttatacggatgggacggacagcaatttgtataaacgcctaacgatcaaccatgataccggtgaaatttcgtttgtgaagtatgaaaatgagaaatcaccaagcacattaacaaagagttttgaagccagttttgatgcgctttcaaagacaggtaacgccctttcagggatgcgtttctatagttatgataaagcaacgaattcgactgcttatcggacctacgttgaaggattcccagtcttttatcagactaactttgggagcgtgaaagtacaattcttaccaactggccaaaagattgatttttcaaattatagtttgcaagtacccgttcctgctgaagacaagcaagtcacattgccaagtaccgagtctgttttgaatcaattgacaagtaatggtttcttgctagaaaatgtggaaaacgtgcaagtcggttatgaatggaccaaagaaaccagtaacgaacaagtgattgatttaaatccaacctactttgtacagtataaaggggtttggcgtagcttatccgcattgatggcgcaaaaagctgaattaaccgaagggagttagatgaatggattttcgcagaattgaaatgatttttatcgccatttttattgcgctggatatctatttatttgcctcgctgaaaggcagtcagacaataacgtcgacggcgattactagtggttcacagactagccagattatgaaggatttaaaagacgatcaaatttcagtgaagaaactctccaagcgccgaacggatggttattatttagccagccgacaaaaagatcagacattattagaaacggcgagtgccaaactaaccggtcaaactgtttcgtttgataaagcgcgcatgacactgacgagtgaattggataaaccactgacttacaaaaaagggaaccaacgcttagccgtggcggcctttatgaaggaaccagacaacgtgattcaagcggaggactaccgctattcacacgcattatcgagtgatcaacaagtcgtatatgtgcaaaaagtcccaggcgggcagatcatggatgaacatggtcagttgatttttacattagaagacgggcagattagtcattacacgcaaacttacacgaataagattcaagttttgcgtgaaaaagaaagtacgaaggtgactgctcaagacgcggtcattgatttatatacagataatgagattccgaataactcacgcattatgtgggtgaaactcggatacagtgctttgttggacgccaatagtagtacggtgtacgtgccagcttggcaagtggccattgagaataagaattctaagagtgtcgtcgttaagcggattaacgcctttaccggtgcgctgatgaagaaccgtagtgaaatttagttgttttagaaagagaccaaggggatagagcaaaacatggtagaaaaagacgcaatgcaagtcagcgtgctcgcaagcagtagttctggcaacacaacgtatattgaaacacctaatcataaagtgttagtcgatgcaggaatgagtgggaaacgtgtgcaagatttaatgcatagtattggccgcgatcttaaagatgtggacagtttattagtgacccatgagcatcgcgatcatagtagtggtgtcggtgttttggcccggcgatacggaatagacgtgtacgcaaatcaaccaacatgggatgcgatggcttcgattattggtgaagtgcctgctgaacacaagcacatttttgaaatgggtagtaccttgtcagttggtgatttagatattgaaagttatggggtgtcacatgatgcggctgctgcccaattctaccaattccatcataataaccgtgcctttgcaatcctgaccgatacgggttatgtctctgatcaagtgcgtgggacaattgaaaatgcggatgcttatttagtggaatgcaaccacgatttagagatgcttcggatgggaaagtatccttggtcattgaaacaacggattctcagtgataccggccatttatcgaatgaagatggggcatccgctttgatgtcgtttatggggaaccagactaaacgcgttttcctaggccacttgagtcaagaaaataacatgaaggaactggcccatttgacggttgcgtcgatcttaaaggaacatgattatggggtgggaacagactttgaaattctagatactgatccggcagttgctgatccattgtttgccgtgtaattagactgaatagaagacattttagttgtttttgcgaaataagttcgctaaaatgcggattagaaaaacaatttaatattcgtaacttgttcataattttttcaaatttacattctatgatagagataatcaataaacagaatttattagaaagtttgggtgaattagtatgaatcagaattcaggattaatgaaaacggctgttgttgccgttattgcagcactaatcggtggtggcgttgctggttatgccggttcaaagatgggaagtaacactgtctcaagcactgcccaagtaccaactaaagcaggtgccactaaaattagtaatatcaaagtcaactcatcttcacaaacaacaactgcctttaataaggtcaacaaagcggttgtgtcagttgttaacttgcaaaaacaacaagataattcaggcgatttgagtgcgctctttggcgcggatagtaccaataaaaaaagtagtagtagtgagcttgaagaatcgagtgaaggctcaggtttaatctacgaaaagaaagatggtaaagcctacattgtcacgaacaatcacgttgtttctggctcagataagttggaagtcatccttagtgatggcacaaaaattgatgctagcttagtcggaacggatgccgtttctgatttagccgttttaaagattgatagtgccaaagtgacgaagaccgcaacgtttggtgattctgacagcattaaacctggtgaatcagtgctcgcgattggttcgcctttaggctcagaatatgctacttctgttacccaagggattatttcagcaaagaaacggacgattgatgtgacggatgaaacaaccggtcaagcgactggccaagcaaccgttattcaaactgatacagcgattaaccctgggaattcaggtggtccgctagttaaccttgcaggacaagtcatcgggatcaattcaatgaagttagcttctaacgggagcacaacggttgaagggatgggctttgccattccaagtaacgaagtggtcaaaattattaaccaattggttacaaatgggaaagttgttcgaccagcgcttgggattagcgtcatcgatttgacgaatgtttcatcaacgcaacaatcatcagtcttgaaattaccaacctctgtgaagagtggggtagttgttgcatcagtcaatgccaactcagttgctaagaaggcagggattagtaaatacgacgtcattgttggtttaggtggcaaggatgtcacaagtgttgctgatttacacacgacactttacagttacgatatgaatagtacggttgaaattcagtattatcataatggtgaattgaagaaatcaacagtgaagttgactgaagcagcatcaacagatagtacaacggcagcaaaataaattaaagccgccagcatcaattagatgttgacggcttttttattttggttaaattcagactaaagtggcaggaatgttaagttttaaaaatgtcaatgtggatagtaacctgggaagaaatccgagcgtctgtggataagtctgtggattgtgggtataacacggttaaaaggtctttttagttatccacaaaaaaattaacaggcggtggataacttttttaaaattattataacaccagaataacgctgatataaaaggatttgtaaccggataatttgagaacgaacaatcaaaaaagggtggataacttttttattaaatttaacgaaaaaatttaggtgtcggttatttagtatcaagaaaaattcgagataccatatttgggacgaacacttgtgcatatgtggacaacttttgtggataagcagtactttccggtgaattactgtgaatagctttttttctgcattgttttcccctaaaatgtaagtaacagtaggaggctatttatgaacattaaagtaatcacagttggtaaattaaaggaaaagtatttaaaagcggggatcgcggaatatgcgaaacggctcagtaagttctgtaagttcgaaatgattgaagtcgcggatgaaaaagcgcccgaatcattaagtgacgctgaaatgactaacgtcaaagacaaagaaggcgaacgaattctcaacaagattaaagataaggaacatgtgattgtcctggcgattcaaggcaaacaacgtgcctcagaagaattcgcaaaggaaattcaagatttggcgacctatggtaaatcagatatcacatttgtcatcggcgggtcactcgggactagcgatgcggttaacaaacgcgccaatgatgcactttcatttggcaagctcacactaccccaccaattgatgcgcttagtattgacagaacagatttaccgggcgtttatgattaatcaaggaagtccgtatcacaaatagagataggcataaaaggcctcattgttgaatgaggctttttatatgcaacaagagagagcagcttgcaacaaaacaaatagtcatcgaattaagcgagatcttctgctatctttaggtttgtagaggaggcgagttaatgaaaattatatttaattgggattcaaagtgtgcacaagatacgattgtcgttcacagtcaaccacagaatcaagcaacggttgaatctgcttttaagaagctaacctttgatcaatcgattcaggtgcgagatgcgcgaacagatcgattacaaaacatatcattaacggcaattgaaagttttacggcctttggacatttggcgaaggtggcgacaatcgatggcaatagctattactaccctagtaatttaaaataattagccccgttttcgcagaacggttttctgagaattaataacacaacgattttaaatctgcagcaagttgccaattttgcggtgggttcaaatgcgcgattggtggtctatacgcaatctggaagacagtatattgttagtcggtattatgccaagcaaataaaggagtggttaaaatgatgaagcaaatccgcaaagactttaatcaagtggcattaatggcgattatgtggctcactgttgtcacaacgctaacgcggggcgaagcgctggctgcttggcgattagttagcctaggcgtgttgattggcattgtgtttggcgtcatttattcatacttatggcgctattcgacgttcggtgcgccgtggaatgttttgattagtactattagtaatattgggtttcaaatactcgctttgaggctctattcgacaacgttatttgatgttgtttcaccgtatttattagggacgtcgttattaacattcgtaatgcacgtgattattttttattactacacgcgctatcaaaataagcgcttagtgaacgaattgaatcaaaatagaaaataaacttgttgtcccctttgcaggttgtttatactagaggaactaggactatttgttaagtagaaatgaggggaatcagatgacgaagagacaacggaaacgactttggctagcaagcggtgtgattttactaggattagtgattcttctaattggatggcaacaccagaccgccgtttttgctttcttggatcaatggcaaaattaccgccaatatgtgcttgagattcgtcatctggggccgtatgctttcttggtgtttggtctgttaatgattggggtcaccttaattccgggtgcgccaacatcagcggtggcattgattattggcgcgtgtttgggtcattggggtggtttcgtggtcaatgcgattggcttgacgatcgggaacttgttgcaagtccaattatttgcccgtgtcagaaatcatcgcagtaaaaagccggattcgcgtgtttaccgcgcattaattaagatgcaacatccagcgcttggtgtattaattggctatgcagtgccgatgattcctacggcctttgtcaacttggcggctggagacacccacctcaccccccgagcacagggcctggcgtgctttgggggttcaacgattgtcgcgtttatctacgcctttgcgggcgatttgcttattttgaagcaagattggaagagtttattgattctcttgatagtcgctgttgtgattggtttaacggaatatggtatccggatgcggcggagtgataaagctcgccaaaaagtcgaacagtttgacgcattaaattaaagttagaagacgtcctgaggaggacgtcttttttatttgtatgaaaatgtatatgataaggtatgatattaaaagtgattgatatactgaagtaagctcgttaaacgaaataacttatactataataaatataaaagaaaaatacatggggcacgcaatcgtgagtaagaaaaatacacttttggtaacattagcattattattatccaacacaatggcgggactcgatgggacaattatcaacacggctttgcccgctattatcagtgatttacacgggattcaatatatgggctggattgtggcggttttccttttggggatggcggttgcgacccccttatggagtaaattaggcgaacggattggaaatcgtggggcttaccagctggcgacattattatttgcggttggttcgatttttcaggcggtttcggggaatatcgtcttctttctgattgcacgaacggtgatgggcatcggtgctggcgggatgaatactttaccattcattatctatgccgacttatacaaaaatttacgcaaacgcgcgcaggtgattggttatgcgactgcgagttatagtgcggcttcaattgtaggacccctaattggtggctggattgtcgatacgtttagttggcattgggtcttttatatcaatgtaccaattgccctagtatcaattgtttgtgttcgttatttctttaaagaaacgcttaaatcacatcaaaccggaaacgtcgattatttaggtgctgggattatgattaccagtttggtgactttattgacggggattcaaatgattgggacgggttcgctagcactcgttttaggattggtatttgctggtttagctttattagttgtcttgtttagagttgaagaccgggcagttgatccgattgtgccgaaccgcttatttaaaaatccgcaattggtgaccgactttattttatttgttgttttatggggcgcatttatcgcgtttaatatctatattccaatgtgggcgcaaggtttacttggattaagtgcgctactcggtggaatgacgcagattccaggtgcggtgaccaacttaattggctcattggcgggtcccgcaattcagcctaaattgggtaaacaccgcgttgtgacattgggaacagttgcgtttttaattgcgtttagcggtatgttgatgatgggcgaccaagcatcgttttggttcttactgttgatgggggcctttgaaggtttcgggctcgggatgagttttaacgtcctacaaatcagtgttcaagaagatgccgaagaacgtgatgttcccattgcgacgtcgtttgcctatctcttgcgaattctcagtcaaacattcatgtcatcgatttacggtgtgattttaaaccatgccttaacacgcggcattgccgaatcgcacggtcaaattacgatggcgatgatgaataagttaagcaatctccaacgcgttcacgaattaccagcgcacttattaccagcgatgcgcgcgattatgtaccaaggcttgcataacatcatgctgattgcgacagtcctattggtgattgtgctcgcgtttaatatctggttacagatgaaggcgaaaaaagaaaattaaaaaaagtgttgaaggtcgtgagtaagttggccctcaacactttttttaataataatattttaaatcactcgccgggcttgggtagttatagatggtatcggtgagttccgttgcggttgtctgatgtttaatcaggttggtaaagtaattaatgagttcttcagcaattgtggtgtaagccgcagcaccgacgagttggttagtttgattgtcaaaaatggtgatgaccattgcgtcggattcttgaatacgattgaaggtataccaatttgtgacggtttgttgattaatgcggtattgactaggagcagcttgtgcagttgcaacagaaacgcctacttgtgatatttgtgggcttgcatataccgtatgtggaatgagtgggtaagtaatgggtgctgtctttttagcgagtagttggttggcgacatagcggccttcaaaaccagcaactggtgttaatttgggttggacacgatctacgacgtcaccaatggcgaagacgcggggattactactcattaaatggtcattgacttgaatgccatgctggttcgctgttaccccagctttttccaatgccagttggtcgatattgggtttgcggcccattgcggcaaaagcggcgtcgactgtcagtttaaaattagcttgattactgagagttagctgattgctggtttgcgtaattgttgtgacgtcagtgtcaaaatgaaagtgaatgcctttttcctgaagactggtgacgagtttatgtgttaaaacttcagggaagtcgcgtaaaatacgctcgttatgttgaataatatggacttctgcaccagcagtaactgcaatatttgccagttcaatggcgatatacccgccaccaataaaggcaaccttttctggtaaacgatcgaggtctaaaaattcattactggtttgtagtaaatcgtgaccctcgattgtagggagcgttggtgtttgaccggtcgcaatgatgaaatggtcggcagtgtaagtgtcaccattaatctgcaaggtttgagtatcactgaagtgggcggtgcccgtgacggtttggatgccggcatgttgtagaccgttgagggtaccagttgggatttgttgcgtataagatcgcttaaaggccatcagttcagaccagttaatagcgctagttccgactaagccatttgtttggagcgcttgttgattgtcgagtgcttcgacagctgaataaagcatttttttaggatcacagccacggttggggcaagtgccgccccataaatcattttcaacgactaagacggactgttgttcagcgagactgtaagccgccgctaagccgccaggaccgccaccaataatgattgtatcaaagtgtgtttgcatattaagacctcctcagatttcaattcgggttcatcttagcatagtcacaaagcgaatcaaaaaaattggattgggtgtttaagcacgtcaattggtgggctgattgctaagtggtacaataagttaacaaatcgttaaccggaaaaaggagtagcacatgattgaatttgaaggtgtcactaagcaatatgaacaaagcttagcattagatggcttgacgttaaccattccagacaatggtctatttgttttggtcggaccgagtggtagcggaaagacaacaacggttaaaatgattaatcggttaattgaaccaacgagtggcacaattaagattgacggccaacccatcaatcaaatggatctccaaacgttacggctcaatattggttacgttctacaaaacattgcgttgtttccacatctcacaattgaggaaaatattaccattcaattagaggtattgaaatggaccaaagctgatcgtcaaaaacgggcacgcgaacttttggaaatggtccatttagatccggatcagtatgctagccgttatccaagcgaattatcagggggacagcagcagcggattgggattattcgtgcgttagcaactagtcctaaggtgattttgatggatgaaccctttagtgcgcttgatccggtgacccgtacacaattacaagatctcgttttgagtttacaaaagcagctgcataatacaattgtatttgtgacccacgatatgaaagaagcgttgcgcttgggcgatgaaattgcggtaatgcgccaaggcagtattcagcaagtcgggacagcaaaagcgatttttaatcaaccaaaaaatgaatttgtccgcgaattttttgacattgaacgccaacaagcaacgttgacagttcaagatttattggcggccgatttaggaactgttgttaataatcagccgacaacgattacgtccagtgcaacattagctgaattagcgcaacaattagtagaccatccagatgggggcgtagttgccactgatggtcaagaacaacggcaattgacgatgaccgatttaacaacgctcattgcgaaacggggggtatgacgatgatgcaacagattgaacaaattttaacgacccaatccggtgagttgctacaagcacttgggcaacatttggagatttcgttattggcgttattaattgcggcggctatcgggattccgttggcgattgttttaacagctcatcagaaattagctgaagcaatgctgcaagtcacgagtgtcttacagacaattccgtctttggcgctcttaggattattgatcccgcttgtcggaattgggacgattccggctgtgattacgttagtactttatgccttaatgccgatttttcaaaatacatacactggtttgatcggaattgatccagcattaaaagaggcagaaatagccttcgggttgccgcgcgctaaacggctactacggattgaactgccacttgcgatgccgttgattatctcgggtttgcggattgcactcgtgatgattatcgggacagctaccttggcggccttgattggtgcgggcggcctcgggacgtttattcttgttgggattcagtcaaataataacgcactattattggttggggcgacactttcagcggttttagcgttagtggtcagtgcattaattcgctggttagggacattatcctttaaaaaaatcacagtcagtttagccatttttgttggccttttcggtgtgatcgaaggaatgacacggtttcaagcgccgcagaccaccatcacgattgctgggaaattgggtagtgaacccgaaatcttgatgaatatgtatcgtgatctaattttagaagaccagcctaactacaaagtaacggttaaacctaatttcggtgggaccacattcttatttaacgccttgaaggctgataagattgatatttatcctgaattcacaggaacggttttacagacgttggtgaagtcgccaactaagacaaaccagaatccaactaaaacgtatcaacttgcaaaaacatcgctacaagaacagttcaatatggcgtacttaccgccaatgcgctatcaaaacggttatgacttggcggttactgcggcctttgccaagaaatataatgtcaaaacaatttcggatttagccgctttgaatcaaccatttacggccggttttgatcctgatttttatcaccaaaaagatgggtatcaagggttaaaggacacctatcaattaaatttaaatgctaaaattatggagccaagtattcgctataaagcgattgcggacggcaaggtcgatgtggtcgatggttatacaaccgatgcggaagtcgcacggtacaaactagttgttttagaagatgatcgtcacttcttcccgccttatcaaggggcaccgattatgaaagccggctttgccaaggcgcatccggaagtcgtcaaagcattgaatcgcttggcaggtcagattactgagagccaaatgcaagagatgaactaccaagtacaggtcaaacaccgcaaagcacgcgatgtggcccatgattacttggttaaacagaaattaatcaggcactaacgaacaatgcttgaccttcacgtcacgtcaggccttatagtgggttttgaaggagggaaggcaaatggattatcagattaaaactttcgctgaattgaccggggtttctgagcgtacgctacgttattatcacgagcgcggtttactggtgccaacggttgctagtaatggttatcgaacgtattcgagccaggatgcagatcgactgcagttaatcttaatgtaccgtcaactacagtttagtctggctgagattcagcagctgttggcgttaccaccggccgagcgtctggaacgcttagcaaatcagcgggaacaactggttaaacaacaagctgcgctaacggcaacgttagcacagctagatgcgacccttcaaaatcaaaccggaggaattcaaatgacagatcaaactaaattcaaacagtttaaacaacaggcagtggctgaaaatgagcaacgctacgggcaagaagtgacgactaactatgggaaacaagccaagcaagaagccgatcagcactttttagggctaagtgaggcccaatatgcaacgatgcaggcggctgaagaccgattgaagacggcattacaaacttacttggaccagccgcaattgccatcagaagcggcgcaaacagcctttgaagcccatcaaacgtggttacaaacagcgactccccggtatagtctagcaatgcaccgcggtttagcagccatgtatgtagcagatgaacgatttacagcatactacactaagttaattggagatcaacgcgtagcggaggctttacaaacgattattgaatattatgcaattgaagcctaaaaaaggactgacatttgtcagtcctttttgattatttagcgggaattttccgtaatacccgtgctggattaccaactaaaattacgttacccggataggatttggtcacgacactgccggcaccaacgacaacgttattgccgagcgtgattcctggcagaattgtgacatttgcaccgagccagacgtgattgccgatagtaatgggactagaaatttctttttttgtcgcacgttctaaggggtcaattgggtggtaaggggttaagagtgatactcctgggccaaatttacagtagtcaccaatggtgactggtgcttcgtcacaaataacgacgttacgattggcgtaaaaatgatcgccaatcgtaatgttttcaccgaagctaaattcaaaaccggtttcgatgaaaaaatcgctaccggtatgaccgagtaatttttggatagtggccatccgtgcatcgttatctaagatttggctggccttttgtaaggcaaggcgggctgcatcccgtttttgaatagtgaccgctgaatcaaagtaccattccccgttggtcatcgccctaaaagcgtcgtcagtttcgtgcatattataagtcgcctccgttaattgtactctctaacgatagaacaatttatcctggagtgcaaatccggttagtgattgcagttcggaactatctatgggatgctaatcatagataatttttggagggcaatacgatggataccaagcaaaagctagcagataccttaaaagaattgatgaaaacaactccggtcgatcacattacggtcaatcaattgacaagcagtgctgacgttgcgcgcaatacgttttattaccatttcgccgatattaatgagttggttgcttggatttataatcgtgaaattgttacgcaactggcagtgtatcaacgtgaacgggattggggcgtcggtctagatgtcttggtaacttatattgaaaataatcggcatttctgtttaaatacgtttcattcacttaatcgagatttgctaagtcgctttttgtatcgagtcgcttttagcatggttgcaggggttgttcaagatttaaaggtggattgtccagcgactttccgagatgaaattgccaatttttatggttgggcattggcgacacagattacgcaatggcttgtaacaaatctacaagaatctaaagaggaattttatcagcgcatgcatcgcatgttaaatggtactgtgaaccatgttttacaaaataatcattagatttggacatttatcctgaattgaccatacagaaaccgccagcttgcagttaaagtaagaatgtaattagcaattatttctttggaggtgactgatatgtttttatttcaaaatatttcaggaatggattggctagtttggggactagtggttattgcattaatggttttaaatgaagcagctcgggctaacaagtggattggattaattctctttgttgggttgccagtcgttttaacgctctttgtttggccaacgacggctggtcctggtagcagtaccgggacttggttccactgggttaaagtgtactcagcattagcaggttgtttagggtttatggcgctgcgctttatccctaagttacaacacaacaagtgggcattgattttcccacccgcaattttagcgtttaatattatggaagctgtgattcgtgattttcaagtttcacacctacatggcttagtcgacggtgtgatcatgaatggtggcgcgtggaatatcatgaacgggattgccggaattattaacatcatcacaatctcaggctggttcggcattattatcagtcatgacaaacaaaaagacatgatctggcccgatcaaatctggccttggattatcgcctatgatgtttggaacttcgcctatgtttacaattgtgttggtgatcactcattctatgcgggcgctgcattattaatttcatgtacattagcagcattcctggttaaaaaagggagctggctccaagcacgtgcgcaaacattggctttttggatgatgtttacaatgagttatcccgcttttgtaacggattcacaattttcagtgcaaggtacgcacagtagtgctgctttgatgacaatcagtggtttagcactggtcattaatgtggcagtcttaattctccacatttatcgtgtcatgaagtataaacgcaacatcctaactgacgaagtctatgctggtacaaaggcctatgaccaagtcgtggcagaaaacacgtcggaaggtaaataaaacgaggctcaatgaaggcgcagttcaatttgaactgcgtctttttttgcattttatagtatgatagatcctataaaggcgggatcaacatgacaactttttattttgtacggcatggtgaaacgatggttaatcgagtacagtgtttcaatggtggtgggacgaattcaacattaactgaggcggggcaagcggctgctaaacgactaggtagtttattagcggaccagtcttttgatgcgttactgacgtcaccattaacacgtgccgttgaaacaatggatgcgatagtgtcgcagactaatcaatcacaaccggcaatcatggtcgtggatgatttaaaagaaatggcacttggtgattgggaaggccaacctggtgctagtttgacgaaccatccacaatatgaaaattacttccatcatccagagctgtttgatgccaaacagattcacgcggagtcctaccaggcggtcttagaacgtgggatgctcgcgattaagactgctcaaacggcgtatcctgatggtgatgtattagttgttgcgcatgggattattttattgtttgttatcaacacactactagggattccgtttgaggaaattcgatcacaaaaaatggttgctaatgcaagtctatccgtactaaaaagtaaaggcacgcagtttgaaaaggttgtgtggaacaaaacggtttaggaaggatttctggatgacaataattatgattcttttgatcgttgcgttgggcgcttttaccagaacggtttttgggtttggcgaggcattagtaacgatgccattattggccctaatagcgattgatttaaaagcggcaacggctttgattggcgcgctgggactaattgtggcgattccggctgtgattcgccaccgccaacagattgatatagcggttgtcagacgactagtgattggttcattattgggtgtgccagtcgggatagcgttgatgacgtatgtgccaacgacgattgtgttgagaacgttagctgggtttttaatcctttatggcagctataatcgctatcagttacaccgacatcacgtgcagcagcaacatttacagtcacatcattgggattatttagctgggataatatcaggcatgatgggcagtgcctacaatagtcatggtgtgccggtggtgatttatgggacattaaaaaaatggccagtagcatcgttaaggggcattctacaggcccattttatttgtgttgggacaatcgttgtaatcagtcatattctagcgggcttttggaccatccaagtattgcaactattgggacttagcttaccattattgttagttgtgattccgttgggcaattgggtgagcactcgaattgatagtcgaacgatggtgcggtatatttatgacttattaatcgtttttggttgtttgttgctgtataaaacgttgtaaaaggtcattaataggtggttggtttattaaatgatgtaaagcttatggacaacgccgcagatagtatactaaaacgatagtgtataaagtttaaatactaaggggcggaaattaatgagtaaagtattagttgttaaggcgcatccacttgctacagaacagtcacggacgttaacgattttggcgcagttcatgcaagtttatcaaaaacaaaatccagctgatgaaatcagttggttggacttgtaccaatctgacttaccagaaattgatcaagaactaatgacggcatgggcggcgttaaaaaagggcaagctatggccaccttaagcgctagtcagcaagagaaggtcgctcggtttaatcgctataccgaccagttcttagcaaccgataagtttgtgattgctaatccgctttggaatttaaatgtaccgacgaaacttaaagcgtggattgacacagtgatggtggctggaaaaacatttagacatactgaaacagctccgcagcccttagtaactgggaaaaaagcagttcatattcagtcagccggaagcgtttatgctggccaagattttgcaacacaatacgttaaaacaattcttggctttgccggtgttgacgaagtcattaaaattagtatcgaaggaattgattattcgccagaaaaagctaacgtgattatgcaggaagctattgaaacagctaaacaaacggcacaagttttttagaggcgatatagtggagggataaccatggattttgaattaccgatatatccagaaaatcaggcggcaatgaagaaatacatgcagagtcaatttgaatttaacggtgttaaagcaccggaccgccatttaattgaacgcgaattgtggcagtctgtgaaacaattgccaccagcagaaataatgcagttcattgagaccttatatgctcgaccaacgcgtgagtatcaatatgttgccatcgagatggcattgcgttcagtacgttggtgggaaccggctgatatggaacatttattaacgttggtgttggaaaaagtttggtgggacagcatcgatgcttggcgaaaagtatttggagagtacatcagactgcatcctgaacagtttgattgggttgtacagcattttataggtgctgagaatttctggctgcgccggattgcgattacgctacaactcagtttttacgaaaaaacgaatgtggcgtttttggaagaagccattctggcagatattgacacagatgagttctttatccaaaaagcaattagctgggctttacgtaactatagtaaggaaaaccctgagtgggtgatgacgtttgttgaagaacacgaactaacaatcttcgcccaacgtgaagccttaaagaaaatcaaacaaaacaaaatgtttcacaggaaacatacaaaaagcagcacccatgataactaatcaagggtactgctttttaataacttaatttaagagggtaacagctaataacaagtattaatggtactaggataagctaatttattatttatctaaacccgccagaactttagccggaatttgattcttggacacagtattaggcccttttaagacgcgttttgaattaaattcaactttgacatagctgttgggagtgagtggcgttggattttcgccagtaacttcgacagggaccacttggtggctaccatcttctttcaccacatttagttggtagtgatagctatacatattagtcactgttttacctgaatcatctttggtggcttctttagctggagattgagcagcaactttggcgtagcctacttcgccgacatacgtatttttgtattaacggtagccagcaaatccgacgatgatgagggcgattaccgcaataatgctaattgtttttttcattgaatgagaactccttattccgaattgataaagttatcatacgatgttaagcgtaaaaaagcgacgattttaagatcagatgacaaaagtgttagccgagttaaggccattgtcacctaatgtttaaattggcggtattgtgcttctaaaatagcgctatctaagatgtgaccgcgcattgccgctgtcatttgatttaggtaaaagccaggctgtaaatcgagcgtggtatcaagtgcaaatactttaagtgtataagtgtgatcgcggttagggggtgtcatcccgccgtagcaagcacttgcttctgttgataaatggtctgttttgggactgtgccaagtattaacaccttggatgaaatcgggcgcttgttggctagcattagccgcgacagtggtcgtttttaaattggcaagtgtccagtgaatccaaggaaacccttgcgtcacttcgtaggcatctagatcgtagaaaacggcagcataactgactgtatcgctaggtgcgtcttgaatgttaaacggaatggaataagttggcacaccttccgcgttaaattgagtgccatgaccgccgtagaggtcgtcgaagtagccgtgatgaatgccagaactgataatttgcatgttgaatctcttttctattttagattttagtccagtcgtcaattgagcgaccatttgtgtcgcatagttcgagccaactattggtgccaccaaagtacaagaagaggccgatttcattcacgctcttgaaaataatgtcttcagtcgtttgattgtcttgaatttgcgctgcatgttcgttgcgcaagtgagtgcccattttagcagcaaagccaaacgagccatccttattaagtggcgcggttggccacaattgtgcccccgctttcaataacatctctttgcgcttttgccagatggctgttccttgtgcttcgcgcgtagcaacagtgaattcgatttggctgacggcttttgtccatcgatgacgtgttttagccggttttgctttgactggtacgcttttggtcaggggataaccaaagcggctgaggaccaagatgatggcttcaacggctggagctaaggttgttcggaaattttgagagacgttggacggaagcgaggtgctcgttatcggtggttgattttgttcggctaatagctgccctacgtagccaatttgttcagtccactcaggatccatggtaatccagatacccgtgtcaacttgatcagtcgaggctgtttcaagtggggagagttgttcaatttgttgcagttgttgctgcgcaaaaccgaggaataaagcggggtgtgcgaatgcggttgtattagccggtgtttgttcaattaaaagctgagtaacgggttgttcgattaaatcgacgatcgtttgggtagccgttaatgttgcattaatttccaaggtcataggaagcctcctgacagtctttgatgcttctaattaaacactaaatcgctggttttgtcagccagtaagaattgattgaaggaatgcttgaaactgagattcaattaaccggaattaacgaatctttgttatgatagaaggtaggaattttaacgggtgggagaaatggcatgcaagcacaagcggtactaaaagaaaaatttggttatgatcactttagagaaggtcaagcagatgtgatcgaatcattgttggcaggcactaatgtcttggcgattatgccaactggtggcgggaagtcattgtgttatcaaataccagcattgatgctacccggtttaacgttggtggtatcaccgttgatttctttgatgaaggatcaagtcgatgcgcttaatgaaaatgggattccagccacgtttatcaatagtacgctaacgcagggggaagtccaagaacgctttaaccaagctgcgcgtggtgaagtgaaattactatatgtttcgccggaacgcttggattcggattactttttagctgatttagctgaattaacgattgatttgattgcggtcgatgaagcgcattgtatttcgcaatggggccacgattttcggccaagttatctacgcctgacggatacgattcagagtatgcgccaacgaccaacgattgtggctttaaccgctacggcaacctcacaagtggcagctgacatcatgcaacggttgaacattcagcacgaagttaagacggggttttcacggcagaatcttgcgtttcaagtagttaaaaatcaaaatagtgatcgctacttaatcgattatttaaaggtcaacaaacaaaaatccgggattatttacgccagcacacggaaagaagttgaacggctcacgaagctgattgaaaaggctaagttagatgtgacaatgtatcatggcggattaaacgaagcggtgcgtcgtcagaatcaagaggattttctctatgatcgcaaaccgataatggtcgcgactaatgcgtttggcatgggcattgataaaagtaatgtgcgctttgtcgtgcatgcccagattcctgggagtttagaggcttactatcaagaagctggccgggccgggcgtgatggcttgccgagtgaagcgattctattatttaaagtgaatgatgtgcagattcagcatttctttatcgatcagtcggaaatggacgaagcgcataagcaacaagaatatgccaagttgcaagaaatgacgcagtacgccaatacgcagcaatgtttgcaacagtacatcgtcaattattttgatgatgattgtgaagcgtgcggccggtgcagtaactgtctggatacgcgtgaagaacaagacatcacgattgatgtacaaaaagtcttatcgtgcgttaaacggatggatgaacggtttggcaaagtgttggtggcgcaagtattgacgggctcgaagaatcaaaaaatcatgcaattccgctttgatgaactcccaacgtatggtctaatgcgtggtgattcgcaaaaagaaatcagtggtttgatcgattacttagtcgcttcaggatatttgcaagcttctggcggtcaatacccagtgctgcaaatcacggcggcgggagttgcagtcttaaaaggccaagcgaaagtgacgcgcaagatggcggtcaaagtgcaaaaaacgttgcctgaagataatgaattatttgaacaactacgtgagttacgccgcgatttagcggaagaacaaggtgtgcctccgtttgtgattttctcggataagaccctatattcaatgtgtgaaatcatgccaacttccttgactgaaatgctagatgtcaaaggggtcggcgaaaataaactagaaaaatacggcgaacaattcttggatatattaatggcagaatagagtgctgagcattgactggatttaccaaattggcgatgtaatcgctgatttggtaaatttggttaagtgcagaaatatgctggcgagaacacgtttcaacaaaaaagcgtcaacggattctaatatccgttggcgcttttttagtatctagtatggtgcatctgctggattaccatattcaaagtgttggtttgactttggattgggtttcgcatcaggtagtaaacacgtataacgtgtaccatcaggaccttcagctaggaagatgcgagtaaaatcattttcagtttcgatcagcttgcagttttcgtgggttaacccataaacatcagttacttgcgtaataatcatctctttttcttaatttgaaaggagtagagtaaccgtacattctaccaccgacttaataataagtatagacttttattgataaaatttcaaattaatccccttatttggtttgagtttcaagctggtggagggtttgtttcaattcaagtccgccacgataccccccaatttgcccgtctttacggtagacgcgatggcaaggaataatcattaatagtggattgcgaccaatggcagaagccactgcgcgaattgcggtggggtgcccgacttgagctgccaaagcgctgtaagttgtggtttgaccatatggcatagcttgtagggcgacccaaacacttctttgaaaaggtgtgccgccgataatatcaattggcagtgaccacgtggtttggtcaccatcgagataagctgttaatgattcactataaggagcgattgcagcttgatttgcaactaatttcgtttggggaagaaaagtggttaattcactgatagtgccatcgggtgaaccaacaaaacagatacctttgggggttgctgcaataataaatgattggccagcatggctaaaagaaccatagaagattgttagcatttagaagccctccttttgattgccctcagtatagcatgcccgttaaaaaacgaccaagccgtaaacaggctcagtcgttttttacttagttaagcaactggttgaaaggttttattttgaagatgatactgaacatcacaacttgctgcgacttctttttcatgggtgacaagaatcacacatttttgttgttgatgggctaattcttggaagagatgaatgatctcctgcgtattttgttcatctaagttaccggttggttcgtcggcaacaacgatgggggctgaacagcacatagcgcgcacgatcgcaacgcgttgttgctggccacctgatagtttttgtacgttcttatgggcgagttcgggattgatgccaaccttgctgagcatttcgagtgcgaaatcggcggcactttcatgcgtcgaatgagtaatggccatcgcagtcaagacgttgtcgagtgccgacatgtaggggagtaagttgtaggcttggaacacgatggacacatagcgattgcggtattgggttaagtcgattttttggatatcggtaccttcgtataaaatactcccgcggcgcggtttatctaaccctgaaagcatggtgagtaaggtcgtttttccagcaccactgctaccgatgatgccgtaaagtttgccggcttcaaaatcgagattaacatctttgtaaagtgtattttcttcagtatcgtaccagtaactgacgtttttagctgttaacatagtggacctcctataattatccaatgagaattttgcgtggctcgagtcgtaaaatattgagtgatgcgagtaagacggcaaatgcgatgatggtgaagccgaatgcgccaagttgcattaaggtgacggcactaatcttcagatcaaggtcgcttgctttgacggcttttttagcagattggccaggttgttgcatttgaccacttggccgattgccaccagtttgcccactaggggcttgaccgccaccagggccgccgttaccgccaggttgcatgttatttgtttgtgagctggttgtcgtttcggttgtgacggaacgcataacttgtttgctaagcgcttgaccagcgaatcgtccgccaatgccggctaaagctaaactgacaatcagcagcatgaacatttcaactaataattggcccacgattttgacgcgcttttcacctaatgagagtaaaacgcccatttcataacgccgttcgcgaaccattaagataataattaatgcgaggataacagtgccagcgatagcgactaaccaaacaatcttattagcaaaactggccattttctgcatggattgtttgagtgattggtaagtactgtcatcagctgttaccgtgaatttcttcgtattgataatcttcttcgctgcttttacaaaactatttttcttagttgggtcactaagcgtgaatgtggcactatccactttgccagtttgacctttaatttggttagctaatgtgtatgccgtatagatgacgtttgcggggtctgtttgttgtggacccatgccagcgctactttgactagccttatagatcccgactacttttagcgtataggcttttttgcctgtcgtgctggctttgactttaatggtgtcgccgactttgaggctgttttctttagccaattcggattcgatgacgacattattagtgtttttgtcgctactatttaaagcgcgacctttcgtgattttacttgtattatctttaaagtcgctgagggttgcggtattgagcactccggtgatttgtaagtcacctgttgaagtggatgactcagcgttgccgccagggccgccgtccatcatgccaccactattatttgaactacttgatgtcgtaatggctttaatggacgaggcgttcgcagaagtcgtgacgctgacgttataatttgccagcccggataatttcgaaatagccgttacgtcttttaatttgacggagggcatggttaatttagggcgcgttgctgtagtacttggggcatcactgctagccgaggcgcgcattttcttaaacgcttgatcgcgatttgcagaaagggtgacgctagcgcccacctgttgtttggtattgttgacggttgtaatggctgcatttctaatcaatagaccagccatgataaaaatcatgatgacggtcatcacaattattaataagaagctacgcccttttttaaagatgacgttttgccaagcacgcttgataaaattcataagtatttcctccttaaaactgaataaatattagtttaggcgggaaatatgaataaattgtgtttgaaatgaagttttttttaaggcgtatttgtgaagattaaccttatagggccaactttctagctcctaaatatggtaaattatagggtatcaaagttaatcggaatgaggagagttaaatgaagaagcgacaacaattttttaccttattatggacaggattaatgttaataatgcctgttgtttcagttattggtagtgcacaaacggtgtctgcgagtgagacaaaggttacacaagtgacaccacgtactgcatctagtacggattatcaaaaagcaatggtggctggggcgcaacagttgttgaataatggccaaccagatgcatggtcagcgttagcagctattcaatcaggcgtgacactgagtgcagcgcaacgcttgagttatcataatgccttggttgcggatgcacaatcaatgctcgctgatcaacgtttttcggcaaccgatttagaagtgttggtaattggggtaacagcacttggtgaagatgcaaccaacttcgctggtttaaatataattgataaaattattgaaaaagcaccaactggtgggatcaacgggcaagtttacggcatcatcgcccttagcatgcgtgattatggtgccaaggcacagcaagcgattgatagtttaattccaacggttttacaagcacaaaacgctgaaaatggctgggcttttttcggtagtaaaagtgatttagatacgaccgggatgacgatgacggcgttggggatgcatcgtgacttcccaggcgttcaagatgcgctagataaagcggtaacgatgttgaaagaaaaaacatttgttgcacaaacgggtggttttttaatccctaatgtttatatgacagaagaaaactcaaatagtacggcaatggttgtcatgggcttaattgcagctggagttgatccagtcacaacatttgttggcgatcaaggcgctaacccgatttcacggctggtcgcttatcaaagagcagatggacagttccgctggaatattaataacgatatgggatcgctagcgatgtcaactgaacaagccgtttatacgttagcccaataccggttgttccaagcgggaaaaggctcaatttatgattttaaaacgccagttattgaaaaagcatcggtaaaggtccaagcagttgatgaaaagggacaaattttaaagagtcttcaattagctgaacaacccgttggtcaaaccattacggtgaatgctaatcaagtcgcagttgagggttatgaattattaggcaatgcacaacaaactgttcaagttgctaaaacgggaacgaccgtgacgttccagtatcggaaacaaatgattgggacaattcctgcagcgcagtttgctgacgttacggtgcaagcagtcgatcaaaacggcaaagtgtttaaaacaattcaattgcagcatcaaagagttggacgcacaatgttgattaatgcatctgatgttgcagttgagggttatcaattaaaagacacgccaaccaaatccatcacgattaatgcagcgaataatacaatcagtttcaagtttgaacgacaagtgactacggttgaaaaagaaaataaacaccaagcagacaatcaagatcatgctcaaataaagcaaaagcaattaccacaaacgggtgttaactcaacagtagttgcttctgtagccggcttgatacttttgactgggattattggcatttggttcaagcgtcaagttgaacatcgttaggagttagatatgtctaaaaagagaatcattgcgattatcggtagtttagttattttaagcggcatcggatacggtacctatcaaagtgtggctcaagataatccgtctacgcgtagtcaacatgttaaagaggaacatagatcaaaaaaacgggtcaagccagcaactgttggtttagatggtaaagttaaatctaaggcctctgagtcacatagtagggcggtatctgaaagtcggaaaacagctgaaacgcgcaagtccagcagtcaatctgaacagacaaatgaatcatcacaaaaatcggcctctagcaaacaattagcatcgcaacaagctgtagaacaaggctcggcagtccaatcggcatcgacccaatccgccattaatcaatcgtcacaatcaactgaaagtaaaccagttacaccgcccactacgacgccccaaccagtccttgaaaaggtgagcgtcaatgtttatggaccaattagtgaaggtaatccgaaatggttgaacggtgatcaagttgaaatcaaggatggggatatggtgattgatgttttaaaacgtgatttgcaaagtcgcgggatggcactatcctatcgtgggacgggcggcggcgtctatatcaaaggcattaatgggctattcgaatttgataaaggaccgttaagcggatggctttatcgagtgaatggcagttttcctaactattcttgtggtaattatcctgttaagagtggagatgtgattgattggatgtatacggaaaatctcgggaacgatcgcaacgcgcctcagggttaaaatcgcaactggtctttgatcaattaaatccaatcgtcatctttgcgtattacgtgattgcaattgcgttctcaatggtttttattcatccgatttttcttgtaagtgaattgttgatgatgattgcagtgaacttgcttgcgaaaaaccagaagaaaacactggggacattgcagggtgcattgttcatgatgctctttatcgtcgtgatgaaccctattatgaataatcatggggcgcacgtgattgcgacgtttggtgggacggtgatcacagcagaggctgtcatgtacggttttttaatggcgctttcgctggcgatcttaatgctagtgtttgtttcctataatcagagtatgacgaatcataagttcttatatttatttgtgcggctttcaccgcaactaactttattaacgatgattaccatgcggtttgtcccactatttattcggcggtttaccaatatcaagaatgtccaaagaacacgtggtgtgcagatggaaacggggagtgttagagcccgatcacatgccgggatgcgtttgatggaagtattattgattaattcattggttgacgcactacaaacggctgattcaatgacggcccgtggttatgggtcacagaagcgaacgagttatcaacgttatcgatttacccaacgggatggttgggtattggcaagtcttgtagcaggcagtgcactttgtttttattttgctaaacaggggattggccgcttagcgatttatccaatacttggctcgattcatttgaatcaaattggttggctatgtttggtgttagtcttattaattgatagtttgccgctattactagaaggatgggaatatttatggtggacattgcgcaaataaaacaatttaattttcagtatgcattggcaacccaacaaaatctgaaagacatcaatttaaccgttcagacgggtgacttcattacgttagctgggaactcgggtagcgggaagaccaccttattgcgccaactcaaaaaagaactctggcccgttggtaaacggtcgggtgagattattttcgagggccaaccgttagctgatttatcgcaagggttaagtgcgcagaagattgggatggtctttcaaaatccggataaccaattagtgatggatacggtcattcaggaactcgctttttcactcgagaatattggtgaaaagagtgcgaatattcaaaaacgaattgccgaattagtcagctttttaggtttccaagatttgctgtatgcttccgtgcatgatttatcgggtggccaaaaacaactggtcaacctagcgtcggttttgattttacagccggatcttttactgttggatgaaccaacagcgcaactcgatcccattgcgaccaaagaatttattagtttattgcaacgggtacatgacgaactcggcatcaccgtgattatcagtgaacaccagttggatgatattttaccgctctctaatcaactttggttgatggatggcggtgagataacgtatcaaggaccggttgctggtggattagcagcaatttgggcgcaaccggcattgcgtgaattcgtcccagatgtgccacacgtctttttacaaaatgagttgattgcaccagctgatattgcggcattaccattgaccgttgtcagtggcaagcaattgattgagcggcgacaatggcagttaacacatactaaacgtgaaatagccacgaacgaccaagcaacaatgctgcaggccaaacatgtgagttttcagtatgaaaaaaatgacccttatgttttagaccagctcaatctagaggttcataccggcgattggttagcgattgttggtaaaaatgggactggtaaatcgacgttgttgaagcttttgattggtttattacaaccgcgccatggtgcaatcaagttacaggggaagaagatcggtaagtgggcgcaagctgaacttttcaaaacagtgggttatctctcacaaacaccgagcgatcatttcagttatgatagtgtccgtcaagaatttatcgaacgggcgcggcagttaaaacgcgcaacaccagaacaagtggcagaagagatgctagcaaagctcggtcttcaaacccttgctgaacgtaacccgcaagatgccagtggcggcgagcaacaattgattgcactcgggattgtattgctagcgcagccgcagttactcttactggatgagccaacaaagggccttgatccgattcgcaaacgggcgttgggtgaattgttaacgcgtttacaagcggaaggcttaacattgattatggcaagtcacgatatggcctttagtgcccggtttgctagtcagtgtgccttattattcgatgggacgattgtatcggaggaagaaccttatgcctttttcgcgcataacttcttctatacgacaaccatcaaccgaatgttacgcagtcaattgcccgaagccctgaattgggaagaggtgcacgcatgaaagctttaaaaaatagttggaccacgtttggattggctttcttgattatggcgattttcatgttgtttatcgtcactttaaaaggacagcattttctgatcttcagttttatctgtttgattgccagtatgctgccattttattggcggtttgaaacccgggatattcgcgcccgtgaaattattttcatcgcggttttagcggcgattgcggcagtcactcgggtaccatttgcaccattgcccagtgttcagccaactagttttgtgattatcgtgtcggcattagtccttggtccagaatcgggttttattgtcggttcgaccgccgcgattgtctcgaatatgtttttgggacaagggccatggaccccatggcaaatgttttgctggggcatgatgggcgttacggcaggcttaattagtcgccatcagtgggcacagaataaatacttgctctgtatttttgggtttgtctggggctttatttttgggtggattatgaatctgtggtattttgtcgcatacgtcaatccactgacgattaagacttttattgcagcctatgtcgcgagtttctattttgacttggcccatgctttatcaaatgttttttttattttcttcttttatcagtcgtggtaccgaatcatcagtcgctttaaagtgaagtatggtttgttggcgacggaagatgagctataaaattgagccctcaccaaagtggtggggctttttttaacggacatcatttcatacttgaaagttcacaatttggtcccaactgcttggtattctataaatatcagataagcatctcccaagtaagtgaatctgagcaagttaattttatgagacaattcctccctaaagaagtgtcttagcaacacccaatgagttatagtttaacggtagaaccaatcatctaaattgaaattccttccaagaaaatcaaaagcgattggctattaaaagcgaagcgtaaaatgaatgattgatgtgggttcaatccccgcaactcgatgactgttgtgttaaaaaagccgcaaccaatttggttgcggcttttttgcgtttagtagaccaatccctgtttaccagtagtatggccagttaacagtttatcagtaatcatttggagattagcgaccgttaagcctgtgtagtgggcggtggtgattggatgcagaatccgcgcatcgattagccgcgcaatttgttggagaatcgccccttgactagtggtttggaattgatagtccgttttagtgaacatgtactcaaatgaaaatgaggctgatttaggcttaagcggtgcgagatcaagtggatgcgtattgccaacaatcgtaccgacttgtccaaacggtttaatcagccgtgcgacctcttggagatagctttcaatatcataaaggaccgcgatggcatcaaaggtgttatccggaagactggctaagttgtctaagctgctaggtgaatgataatccagcgggtgatcaactccgtttgtttttagccagtcgaaatgagtgagactgcttgtggcagtgacggtgaatccggcccacttggcgagttgactgagaattgatccaaccccaccggcaccattgataatcaatagttgtttgccacgattggcattttgttcagcggtaaaaccaagcttttcaaaaagtaattcataggcggttaacgaaacaagcggtaagccggcaatctccgcggcactgattgtactaggcgcaagcgcacaaatcgcggccggaacacattgatagtgttggaaactgccatcgatctgggtactgccagcatagaagacaacatcgccaggttgaaagttggtcacagtggcgccgaccgcttgcacggtaccatacccgtcatagcctaaaatggttgtggtgctagctcgtcttttaaggtcgacagggttgacgctacttgccctgactttgatcagtagctcttcaggtttaggcgtagggatttcaccagacactgcgtgccaattatgttcggtatcaagttggatttggtgattagtggtcatgatgacgtcatcctttctgaataaaatggttagtctaagcctactgctaatcaccgcataatacaaaaaaagacgcccaattaagaacgtcttgagttcatttaaattgcttcaacagtaacttcttcagttggttcatctgcagaagttgtctgtaaaaattgatcgcctgcaagatctttgtagaatgccatataagttgcattcttatatggcgttaaccagaaatagccaatgccaagtgagaggccagctaaaatatcccaacctaagaagcttagttgtaagacgaaaaaccggaatttatgcccattcattaactcacgactcttagtgatacaatctaaaaagctaacgtcagcttgtggatcgttatctgttaagtccttgaagatataagaagcttgagaataagcgtagcctttaatgatccccggaataatgaataacaatgcccaaaggaatgtaaataagctagctaaaattcgaattagaaaagcgcccaagaaataacgttttgagaagacactgaaagctcctttgagtgaactaaaatcagcatctttcgaacggagccaatctaagaaagtaaaattaatcccaagtgtaatgagccccaaaatgaaacttggaatttgaccagcaaaactactaccagacgaatggcccgaaaaagattcattggcagccattgatgggtcggtgtttgcgaagatggcaatcatggccatcaagactgctccgacaataatcaccccaataattgatagcagagtggggatgatgttcaacgtaacggcctttccccaatgaccagcaaataatgacttaacttcttttttaagtgaagcgcgtgattgatactctctttccatgataattcctcccttactacgtagataaattatactattaattaatggctgaaatcaatttatttttaagtatctttgaaaggattgttggggattagttgttgaatgcactggtacatcaggtattctataaataatagcacatcataattaaatagtgtaaaatataaaattaactatttttgttaaggggatgtatagaatgaataagggtcgattagaagcatttagcgatgctgtcatcgcgattattgtcaccattatgatcttggaatttaaaacgccagaaacaccggaaattaaggcacttttggaaaatggtccctacttttttgcgtatatcattacgtacgttttcgtaggggttgcttggtataatcattactatatgttttcgctgacgaaacgaggaacaaagcgtatttattggctgaataatatttggttattatccatgtcatttttacccgttgcaacggcttggacggggcggttcatcaatgaacgcggtccggaatatttttactacgtggttcatctgatttggttattggcctacttcttcttgagtgatgcattggcgaacgccaatcgtgaagtcgcccctgagcggtatcaaaaaattaaagccatgccgatctatagcacgattactagaccttatttctgggtgattcaagtgattctattagtcgctatttatttctttccacccatcgaattaattttcgtaatggtcgaaatttatacgattgggaatcgtaccgacaaagaaagtgatcaattattcaatgattaaaaaaacaccgctagcctattaggttagcggtgttttttgggagatctagaatttaataacaactttcccggttgagtgattcgtagcacttagttgatgggctttgatcaagccatcagcagaaaatgggaagacagtatcgataattgatttgactttaccatcggccattaatgcggcaatctttttaagttgatcaccatctggcattaaccagatagctttgaaagtcatattggtatctttaatgatggccgcagtttcaggcgcttcaccaacgattgaaatttggcgacctgtttcaggattgaggacagcccatgcatcgacttgtccttgacccccgatagtgtcgataacgagatcgacattgtgggctttatcggccactttttcagttcgatagtcaatgatttcatcagcgccaagttcacggacaagatcgaagttcttcgcactagttgtggtgataacgtgggcgcccattgcttttgcgaattggatagcatatgaacctacgccacctgaaccagcttggaccaggacggtttcgcctggttgtaggtgaccgtggttaaagagtgcttgccaagcagtttcgccagctaatgggacggcagccgcttcttcaaaagtgacattggctggttttggtgcgattaagttgtcatcaacggcaacgtattcagcataagtaccacgatttgaagtggcaggtcgtgcgaaaacttcatcaccaacgtgccattctgttacggctgatccaacggcaacaacgaccccggaaaggtcccagccaagaacgattgggaattcccattggaacatgcttgtgagatgaccttcacgtaatttccagtcgagtgggttgattgctgtcgctttagattgaattaggacttggtgttcaccaattgtaggcatcggtaaagtaatcatttcaagttggttttcgtcaccatattgttggatggcaacagcgtgcattgtttctgacatatgaatagcctcattttcttattattagtaagtgtagtgtaccaatcaaatggttgttaagtcaattaacaggcttaaaaagtaaaagaaaagcacccaatttggttaattggatgctcagaaaataatgctgttaatcctcaaaggctaacctgtttgagtcagcactctgtatcaaacgtgctttttaaagctgcctcttgcgcttagccacgtacctgtaaacgatcgtctttggcgctcattcacggtacgattctaatgctcagaggcaaaccgctttaaacgcactttatatcaaacgtgcttctcaaacagccttttccggttaactacaaaacggacatcatggctgagacccgccataatgcccgtttttacgttaatcctaaaagtctaactcgtttgagtcagcactctatagttcttcttctgctatttttgctagtgttgtttttgatgggatgaagaatagggcaccagttgttggttcactgaagtcgagtaggtggtcataattgccggctggtttgccgacgaacatattggttaacatgcgttttgtcactgaccatgttcgagaatagccgataaagtaagtaccggtcattttttcgccagggtttgcgtatggaacgttcatgcgaacaatcttatgttccacaccgccttcgttatcttgtgagacaacgttgtgcgcgttggttggcttttcggcgtcagcaagttctaagtcagaaaactttttgcggccaattgttttttcttgttcttcagttgaagtatggttccagctgtccatggcatggatatatttctgtgcaaaagcgtatgaaccgttgatgaattctggatcttcatcgccgactaatgcgtatttagcagtttcatcgatagcgggattttccgtaccgtcaatgaagccgatgatcgcgcggccttcgaagtaacggaatccgtgtgtttcatcaatcgttgttgcgttatcagaaatgaattgcatcatttgatctaatacttcataacaaaccgccatttctttggcccgaatatggaagaaaagatcacctccggttgcgacggcatcatgtttagggcttggaattgccttgaagggttccaattcctttggttttggtgcgttagggaataagtaatcccaagcatccgagccaatcccgaaagccacgcgtaagtgggcatctgggtaacggatattcatgctattgatgatcgctggaatgcgcgctgctaattcggtaacagccgctttgtccgcctcggcatcttgccgattcaatttctgggtgacgaaaatgatgttctcgccagcatctttaaaaacgtcttgtgcatctgtgggtgtaattgccatgttcagaacctccaaataaaaatttaaagttagttatttataatcattattatctagctcagtgcaagcataccaaaaaacggttttttttaccagtcccaataattaaaaaaagacatataattggtagtcatcctgaattctggataactaccaattttttattaatgctcagttgctgaacgcaaccaaacgcactctattcttaaacgtgcttttttaaacagcttcctgcgcttaaccaaatttgccaaatcgccgattgcatcggtaattcgtcaaatcctgttaatgctcagaagctacccgtttcaaacgtactttatttaatttctgctaatgtcttttcaagatgggctaggacacggtctttacctaacaattcgattgaatcaggtaatgatggaccatgcatttcgcgagtcgttgcaatccgaattggcatgtacaattgacggcctttaatcttcgtatctttttggatgcctttaatgatttgcataatccgtggtgctgtgaataatgttaaatctttcaagcgttcgctgaattccttcaaaacaacggatgctgtttcgttatttaattcttcaagcgcttcggcgtctaattgttcaggttcttcaaagaagacatctgacatttcaacgatttgagctgtgtagctcatttgatcttggtataacgcaatcaaatgacgggcccattcgatcattttgctatcaggattttcagcgattttacccgctttaatcaagctttctaacgaaagatccatgattttgtttggatctgattgtttaacgtattggttattcacccattcgagtttcttttgatcgaaactagctggtgatttgctcaaacgttttggatcaaattgtttgatgaattcttggcgattgaacaattcgctttcgccaactggtgaccaacctaatagggcgataaagttaaacatcgcttctggtaagtaacccaattcgcggtattgttcgataaattgaagcactgattcatcacgtttacttaacttcttacctgtttcagtattgatgatcaatgtcatgtggccaaagactggtggttcccaaccaaaggcttcgtagacagccaattgttttggcgtgttggcgatatgatcgtccccacgcaagacatgggtgatttccatcaagtgatcatcaacgacaacggcaaagttatatgttggcatcccatcgcgtttcatgatgacaaagtcgccacctaaacgatctgattcaaagctgatttcacctttaacaatgtcatcaaacttgtaaacgtgatccttaggaagacgtaaacgaacaactggttgtaagccttttgctttagcagcttcttggctagccttaatttcatcatcactcataccttcgtattcgtagatgtaacgtggtgcttcgccagctgctttttgggcttcccgttcttcagttaattcatcttctgttttgtatgattcgtaagctaatcccttagccactaactcttcaattaaaggcgtgtaaatttcgcgacgttctgattgacgataaggaccaaagtcaccaggcttatctggaccttcatcccaatccatacctagccacttcaaattatctaactgactgttttcaccgtcagcaatgtttcttttcgtgtcagtatcttcaatccgaatcacgaaagtccctttgttgtgacgtgcaaataaatagttaaacaatgctgtacgagcattcccgatgtgcaaatgacctgttggacttggcgcataccgcactcggattttattttttgccataaaaaaaacgcctctttctaaaattatacttgtctactagtttaccgttattatgcctaaaaataaaggctcagagaccactaatccacaaaaaaagaatctaggacaaaagtatgtttgtcccagacccttcttctgatagtagaattctatcatttaaacgtgctttttgaaccatcttcctgcgcttaaccaaatttgccaaatcgacgattacatcgtcaattcgtcaaatccagttaatgctcagaagataaccagttcaaacgcactcttccacttaaacgtgcttacactaactgcctcctgcgccttgctacatcagtcacatcaccggctttaccggcaatccgcctgattaggcaaatgcttaaaagcaaaccgttagtgacgcactctcaccgcattaacggagtggtgtccattgccattcttcaacttctggtaaatcagtaccttcattgcgaatgtattgattgtgtttagcaaccatgtcatccattgattgtgcgaattgaccagcttgatcaccaagtacgtcacctgcaacttctttagatagactgaaacgatccatttgattcaagacacgcatgtcgaatggtgttgtaatatcaccattttcacggtagccatgaacatgaaggttatggttgtgacggtcaaagaagatatcacgtactaagccttcgaaaccatggaatgcgaagaccactggtttgtcttttgtaaagtacatgtcgaattcttcatctgttaaaccacgagggtccactttaggtgaacgaagtttcaataaatcaacaacgttaatgaaacgaatcttcatgtcaggatattgtttgtgcaagattgagattgcagccaaactttcaagtgttggttctgtcccagcagctgcaatcacaacatctggttcagcatcttggtctgtacttgcccagtcaataatcttcaaaccattcttaactaagactgttgcttcgtcaattgagaaccattgttgacgtgggtgttttgaagcaaccactaaattgatcttttcttggctcttgaagacagtatccattgttgctaacaacgtgttagcatcagcaggtaagtattcacgaatgaattcaggtttcttttcagctaagtgtgttaagatacctggatcttgatgtgtgtaaccattgtgatcttgttggaaaacagttgatgtggcaatcacgttcaatgaaggatacttgttacgccatgcttgttcatcagccttacgtaaccacttgaagtgttgtgttaacattgaatccacaacgcgcaagaatgattcgtaacttgcaaagaaaccatgacgaccagttaggacataaccttctaaccaaccttcagcttgatgttctgataattgtgaatcaagaacacggccttctgttgccatgtattgatcgtttggttctttgattgattccatccattgacggtttgttgcttcaaaaatatggttcaaacggtttgacattgtttcatcagggccgaagattctgaagtttttattttgatcgttgtctttgatgatatcacgaacatattcgcctaaaataatcatgtcttgcgcaacgactttaccgtgttctgaattatccacagcataatcacggtaatctggtaagcgtaatggtttaggatcaatcccaccattggtgattgggttagcagccatccgttgatcgcctttaggtgcaatttctgcgatttcaggttttaattgacctgcttctgtaaacaattcttctggacggtatgatttcatccaatctactaatgcatcaacatgttgcatgtcagcactgtcaattggcactggaatttggtgcgcacggaatgaattttcgattggtacgccatcccatgtcttaggaccagtccaacccttaggtgcgcggaagacgatcattggccatactggacgagatgaatcgccgttttcacgcgcattcttttgaattgcttggattttttcgatggcttcatccattgcagcagcagttgctgggtgcatcttttcagggtcgtcgccttcaacaaagattggttcccaaccattgccttcgaagtatttcgttaattcttcatcactcttgcgtgaaagaattgttgggttagaaatcttgaaaccgtttaagttcaagattggtaagacagcaccatcattcttaggattgatgaatgtgcttgataaccatgatgcagctaatgggccagtttcagcttccccatcacccacaacaacagcagcaatcacgtctgggttatctaaaatcgcaccaacaccgtgtgataatgaataaccaagttcgccgccttcatggattgaaccaggtgtttcaggagccgcatgagaagcaacgccgcctgggaatgagaattgtttgaataatttcttcatcccttcaacatcttgagaaatttctggatagatttctgaatagctaccatctaaatatgagtttgagaccatcacttgaccaccgtgacctgggccttcaacgtagaacatgtttaagttatatttattaattgcacggtttaaatgagcatataggaagttttggcctgagattgtcccccagtgaccaattggttttaccttaacatcttttgcttccaaaggacgtttcaatagtgggttatcttttaagtataattgaccaactgagatataatttgcagcccgccaaaatgcgtcaactttagcaaggtattctttgcttgaataatctgtcattttaatagcacccctttttaattttaaaaaagttcctaatagctttactttaagttccagtcgcagcttttgcaactttgttgtttctgactactctcttatcatactaaactttttaaaaaagtcaaccatttttaatattgggtcgtaccaattttttgaatctaaaaatagcggccctattcgcgaccgctaaccgtaacgaatgtattatatttcatgtattggtagtgcaggcgcatcgttgaaaattcaaacggtgtcccatcgtctaagaagaaaatcccttccatgatgccaactggttccgtcggtttcaactttaagtgcgcttgatcatcatcagttgatggttccgcgaaaattgacaggaaagcgcgtgtgacttcttgatttttctcggtttccaagtagttaaagattgaactcgacacaattttttctgtcaattcgggcattaccttaatcggaatgaagcccgtttcaatcatgaatggttcatcatcaaacaaccggagacgcttgatttcgtaaacaaaatcatctggtttcaggaacaagtctcgttgcaattccgcgctcggcttgatgacttggaaatctaataatttaatccccggtgtccgattaccggctttaaaactgtcggtaacccctaggttagagccattgtaattaaaaaacgagccaccctttaaataaagtggattaataaaggttcctgaaccccgttttttgaaaatgatcccttgattagacataacgtttaacgcacgtttgaccgagctacgactcacttgatagtgttcagtcaacgtccgttcatcgggtaatttcatgctgggaaatgattctgcgttaatcgctttttttaagtccgcgataatattctgataaactaagtcggccatgctaaactcctttataaatcattttatctcaagcttattatacatgattcctaaaagtcgtctacaaacagactcgataaatgttcaattattaatgcaggccaataaaaaaagaggtgctgagacaatgtttattgcctcagcacctcgcgcgctccagatcagactatcttgcaaaaaatgcctcacagcgcctactttttatttaatgtgcttgaaattgggtatagtattctgctagtaattgggcaatccggttcccagtaatggcataattttcagcgggttggttagctaatgaaatccgcaagtagccatcatcagtccccattcctgccccatccatcacaacaacgccgtatttagctgcaagtttatcttcgaaatcaagatagctcacgtgcttttcgaaatagtcgtggaattcatgcccatactttctttcagcaaaatcatagatgttaaataccgcataatattcagcgttttctttagagtgatcacattccatgcccatcgattcccaaaaagcgttgtatcgcgcatcaaccattttcttggaagcttcgatgtatggatccttttcaccttcgtgaattaagctggtcaaactaaatagtgccatcaaaatttgttgtggtgttgataatcccgcggtgtggtacaacgcgatttcacgactgtcagccactgttcgatcaatgaatttcatcgcaagcggattaggcgccacaactgagtaccgtttttcaaaagctgccttaatcgctggttcttcagccgttcgcttagcaataatttcatcaaaaacattatcttggtgcactgctagtaagcctaaacgatgcccagttgccccataaagttttgaatacgaataaactaacatcgtatttcggggggcaattgagtaaattgtttggaaatcattcacaaaagtcccataaacatcatccgtaatgatgataatttctgggtttgcttcaacgacctctttaatcttagctaacgcgtgtttgctgaaagcccgcgaagtggggttcgttggattaaccacaaaaaaggctttgattgtcgggtccttcaattcttcaaacttggcgtccatcatttgccagttgtcatcttcaacggaactcacatcgaattgctttaatttatattcacttaattctgggatttgcaaataaggggtaaagattggggtattgatggcaatcgtgtcgccaggccgtaagatatggctgatcttcaattccttgaacaaataaaccattgcggctgttccgccctctgttgggaagacatccgtttgattagctaatttttcaccattatatagtgacacttcaaggtatttatttaggattttttccacattgattaaacttctcgaaggtactggatagtgattgccaatcgcaccgtcgacaaattcgtgaaccaaatcatcctgattgaggcccatgtgcttttcggtataatctaaaaaggctaatataaatcgatctgttttatgactggcatcaaggtaggcatgcagccgttgtgcaatccctgctttatcaacgtagcccgccatatctccatcagcctcgttaattttcttagcagattcttcgacgccaaattcgacaagcttattaaaagctaatcgcgcccgcgtattaatccagttagggtccccacgaccaacattaattggcgcattatgcattgtatttttttctgaattttctaagaacaaagcggcaacttcaaagtttgacatctcttttaatcgctcaatatctaatgagtgcatcgtttttccacctttttcaattacttgctacattcataatcgcatctaaaagcactttaacgctaattgacagtcaaaataacggctagcattgtaaatttattgtttgatttattatatcgtttttgtctcaaaaataaagcactcattcaaaaatcaaaccataaatgccacagcgattctccaacttcatattgcatcatttaccacaaacctgcaaccctgcggcgggattttttctaatgctgctaaaaaagcacatcatcgttcaacgatgatgtgctttttaaagttttaagcgacgttattccttattttctttgaagaacttcgcgaaatttttgcggtaattgtgcaacatccatttaatcaatagccagcgtttgagattcatatctttgctatattcaaaagtggtgccgtaacgtttttgtttgatgagtgccaatgccttgtctttttcggcattattgcgggcatatttcttaaagacatccactgaaacgcccaaccaaagtgcgggactgtcttcatctttattcgcccaaacaacaggttcatcttgcaagtcgtttgtcacgtaatcgcgcaccacccattgggctaagttatagccgttcaaggtaacaaagaaactactgcggcccatccgtaaattgatgtcgaataacttgtaggtgttatcgcgttcatcatatttcatatcgaggttggcataacccgtaaactcgatatcttcaaggaatttttggacttgttgataaatttgtgcgttgtattccggcaaaatcgccacgtaattcccaatagctgcgggtgctggatcttccaataatggatggcccagacacatcatcttcacgtgatgttgttggtcaacatagatgttcatcacgtgcatccgactgtcatccccaggaatgaagtcttgtaaaatcatgtctgattggtagccattttcatatacttttcgcatgatgtcttggaattcagcttcacttttaatcgtgaaagcttttttgcgcccttcaaaatgcacatcaagccattccacagaatccgccggttttaacgccactggatattggaaaggttgttccacctgattatcttcaaccatttgcttggtaatgatgtgcgtcttgggataaggtaagtcatatttgtcacagatttcatagaaggtttccttataagtcaacttttctagtaaatcgtgatcaatatatggacaaacaaagacatcttccaattccgctttatgttgtgaaattaagctcgcatagccatcaccacagccaatcaaaatgactgggccatcgctatcgcgatagatttcctttaattttagcatttcagtaatgaatccaggatcttcactgaagcctggaatcaattctaaatcgacgatttttgtaaaccgagttggtgctaattcctgacttgcgtaggccttaacaggttcatgatacatctcataaaacgaacgggccatcccgtaaacgttaaaatcgctccccaataaaatgggggtgaagtttttaccgtttgcttgcatgctgtcaccttctatatcaatatttatcgtagtataccagactgccgttcaatatacgtcagctcaggatgctctttgttaaaacttaattagtaattgctacttgttgtatagcccgtcgacaatattttggccgaccactgtcatcggatcaatcactttgtcgggatacaatggaaattccgactgtgcaacactcaattcggtacagcccaaaataaccgcgtcacaatcatagtcatttaacattgtatcgacaattttttgatacttgtcatggctgaatgtcccagtcgccttaatgtcatcataaatcaaactcatcgtggcatcttgcaatgtttggtcgggaacaacactttcaagaccaaaagcagcaattgctttttgataaataccggcttgtcgggttccggttgtgctgagaacaccgattttcttcaagccgggaattgtttgttgcatgtgtttgaccgtttcccgtggcatgtggataatgtcgaaatctgcggcagcttgtaattcgtcgtagaagtaatgggctgtgttacaggtcattaccatgaacttcggcgctaacaaattcatttggcgaatatcttttaacatcacgggcaacggattttcttggctgttgtcgaggatgtaggctgtgcgatctggaatttcagcgtggttgaacacgacgtaattcagataatcttgatccttcttagccggtgttaattcatcgattagatgtacgaaagtttcggttgccgccgtccccatgccgcctaaaatcgtaaacatttcttccatggcaattctcctttacttaattgacttcatttgatgctggttagtccttcttttgaggactcacttcgatacctaattcttctaattgttccggtgtcacttcactaggcgcattggtcattggttctgtggcccgggaatttttagggaaggcaatcacgtcacgaatattgtcgcgactagcgagcaacattgcgaaacgatccaaaccaatcgctaagccgcctgatggtgggaaaccgaatttcatggcatttaataagtggccgaaacgttcttgagccacttcaggggcaacccctaaaacagataacattttttcttggacttctggattaaaaatacggagtgaaccgccacctaattcataaccattcaagatgatatcgtatgaaattgcatgtgccttatgtggatcagtatccaacaatggaatatcttcatcacgtggacgcgtgaatggatggtgggctgcaatccatttgccaaagccttcatcatattcaaataatggccaatcaacaacccatgtaaatgcaaattggctcttatcaatcatatccatttctttagcgaagtgtgttcgtaagtaacctaagctatcacaaaccacttggaagttaccggcaacgattaaaattaaatcatcatccattaagttcaaacgttcaacaagcgcttcttggtaaggtaataagcctttagcagaagcccctgataatttatcaccagcgtatttcgcccacaacaatgacttagcgccgtaacgttcaatgtattgttgttgttcgtctaacgctttccgtgaatatttaggggcggcattattaacgacgattgcgcgcacatattggcctgcttcaacagcttcagagaatggcttgaagtcagaatcttgcacgatttctgtaatatcttgaatttgcatatcaaaacgaacatccggtttatctgaaccatacttgtccattgcatcttgccatttcaaacgtgggaatggtgtttgcacatcgatgcccttgacgtctttcataacttttttcaataaaccttctgtttcggtttgaatttcaacgtctgataagaacgttgtttcaacatcgatttgtgtaaattctggttggcgatccccacgtaaatcttcgtctctaaaacaacgggcaatttgatagtacttatcaaagccggctgacatcaataattgtttgaagagttgtggtgattgcggtaatgcgtagaaactacctggataaacccgtgaaggcaccaaataatcgcgtgcgccttcaggtgttgaactcgtcaagttcggtgtttcgatatttaaataaccattgttatcataatagctgtgaactgcacgagtaatcgcagcccgtgttttaatggcattttgcatttctggtcttctaagatccaaataacgatacttcaatttcaaatcttcagaagccgtattgttatctgaaatttcaaatgggagggtttcagctttgttcaagaccactaagtctttaacaatcacttcgattttccccgtcttcatgtctggattaatggccgcttcatcacgcgccatcactgttccttggacttcaacgacatattcactctttaatttacttgctacttggaaaatatctgcatctgtgtcttgattaaacaccaattgaacgatgccttcgcgatctcttaaatcaacgaaaattaagttcccaaaattccgttggctttgaacccaaccatgtaatacgacttcttggttgagaaattcttccccaactaatccacaatatgttgttcttgttctcatatttgccaatcctctctgaatctacattttataaaaaataaaaaaagcaccctcgtctttcgacaagggtgctttgcgcacggtaccacctttaatttcagctgttgataacgctatctgctagcgggatattcatccaagcctcaaaagctgtcaactggaatcaataagtaactttcaacggggttactctctctgtgattgatcgctaaaaccaagtactttatcgatggctacattttattataatgtccaaaatatatcacaaagccctttaaccgtcaagttttgcagttggattgagctagctggattcgaaccagcgcatgacaggatcaaaacctgttgccttaccgcttggccatagcccaataatgcggcaccaagattaagttggcgccgtaaattgattgaattgaaacgtgctttcattaactgctttctgcgttttgctacgtattgcaaacaatcagctgtgctgattattcacaacactagacaagtgttcaaaagcaacccgttaatgacacactctaaacgtgcttttgatgacaacaatttccgcttaatctaaaattcccaataatcctaaaaacccggattattgggaattttgtattaatgctcagttgttaaccgtcatcaaacgcactctaaacgtgctttggcagccatcttcttccggttagctacatcagtcaaatcaccgactttgtcggtaatctgcctgattaggctaatcctcagaagataaccgactgcctgcgcactctttaaattaccatacaaatagtccgactgttgctgctgaaagaagtgatactaagattcctgatagcaacatgtagccgacgtttttggcaatcatgtcgttcttttcacggtccacaaggcctttgaaggcgccgatgatcatgccgactgttgagaagttggcaaatgatgtcacgaagaccgttaagacagcttggtaatgtggtgcgaagctcccgattgaatgttggactttacccatgacaacgaattcgttggtcaccaacttcgtccccatgaattgtgcaaattcaaaagcgtggtgcacatcaagtcccattaaccatgcgaatgggaacatcacgattccaagtaaatgttcaagggtaatccaagggttcactaattgaagcaccttgtcgatcaaggcagccaacgcaacaaaggcgatgacgtttgccgtgataattaaaactaatttaccagcatttaagattgaatcacctaagaatgagaagaatggttcacgttccactttgccttcaaccatttcggttgcttcaacagctgcggaaccactcccacccattttagcaatcgtatcttcttcgggtgtgactttcactgggtttaaaatattggtgacaataatagcgttaataatgttgaccggaatcgccgttaaaataaattggcccggcatcatttgtgtatatgcgccgatgatggaagctgtcacacagctcattgacatcatcgcaagtgttaatgttcgttctgctttcatttgtttcaattgtaagcttgaaacagctaatgcttcggtattgcctaaaaacatcatttcaactgcaaagaatgattcaaactttggttgtcccgtaatcttagctaacccacggcctaaccatttaatcacccaaggcaagaccccgatatacgttaagatatcgaataatgggataatcatcaagattggtaataacacgctagcaacgaaatccatttgtttcacattgacccaacttggtagtgcaaaagcaatcccagtataggcaacttgcactaaccagttaaagccgtttgctgcacctaaaacaatatcccgcccgattgaaaaactcgttaaaaaccaagcaagcactaagttaatcactaacatgattaagacggagcgccaatcgatttctttctttttctttgagaacagaaagccgactccaataaaaatcagtaatccaacaacatttacaagcaaatacacgacacgccacatccttcatttgtctttttcgtaccgctttaaataataccgttcccccttgtaaatgtaaactattgttcaccccctaattgcataaataatcacttgttaaacgcaactaaattagtccacaaaaaaagcggtccccttttgcaaaggaccgcttttccattcatttttaatagcccgcattccactgatttgtagactgttgcgtttgccaagtattggtcgtgttactgtaatcgttgttaccactataagttgcactgttcgagtagccatagttactttgcgtcgtcgttgcagcactctttccaccattcatgacactttcagaataaaccgtaaactcttgatgattttcttcacctgtaaagttggtattcaaatcgttttgtttggtttctgcgttgttaatcgttgttttttctaatcccagtgacgttctcaagacatctgaaacgcgttggatttcttcattggttggaatctgatacgagctaccatcaatatcagcattacgtccagttaaaacatcagactcaattgatttagctgcctttcgataatttgcttgaatcgctaccatgtcatcaaaactgaggttagtggcaacactatctgacaaggagtctaagatagattcaaagttggtcaaagatttaagcgagactgcagaattaatcatcgacgtgataacttgtttttgccgtttttgacggccataatcgccttctggatcatcgtaacgcattcgtgagtagtctaaagcggcttttcctttcagatgcatcttgcccttagtaaactcgctcccgttccattcgaacgtaaatggtacgtcaacatcaacgccaccgacagcgtcaacaatcttcgataagccccccatgttaaccgtgacatagtaatcaattgggacatcgaacatcttttcaaccgtcgacatcgccatatcagaaccaccaacattataggcagcattaatcttctgcatgttaaattcatctgcgccttgtaactgcgctagcgtatcccgaggaatgctgaccaacttgacctgctctttatctggattgactgtcgccacaatcattgtatcggaatttcctttatcaacccggccctcagcaccagtatccactccgagtaataaaatagagaatggttttttatgtttaatcgttttagcggcttttttagtcgcatttggtttataaattttattcgctgcagacttcacttgattactgatgcgtaatgcatacgcgccgccaccgaagaggactagcgttagaatgagtatcaaaactttcatcgtgcgatgctttttaacttttttgtagtttgcttctcgagatccgaaaaatttagaattctgcataggtgtttcccttctattatgtatcataccggcattaataatgttatgttgctattatagcggaattatcatttcaaacaacgccttttaagaaaagttacacaattttaataattccttcaattgttgaacaacactttcctaagcgcttttatgctaaaatgtaagcaagtcttaattatggaggtttcatatgtcaactcaacaactccccatccgcgatgctgttccagaaaagctcacatgggacttaaccacgattttcaaaaatgatgcagcttttgaagtagcctttaagaaagttaaaacgcaattacccacactcaaaacacttgatcgtccgtttgaatcggctgatcaattagtcgctacaatcgaacaaatcttagccactttccgccagctcgaaacaatttacgtttatgctagcatgaaaaatgatcaggatactgctaacgcaacttatcaaggctatcaagcccaagtggacagcttagcggccgaagtttcagcagcagcggcctttttagagcctgcgattcttgctattccggctgggcaattagcagattggcttaccaagacgcctaatttagcagtttacagccatttcattcaaaccattaccgatagtcgagaccatgtcttatctgggcaagaagaagccttgttagctgctgccggagatatcttcagtgctgctagtcaaaccttcagcgtcttagacaactcggatttacaattcccagaagtgactgacgaaaacggacaaacgttgcagctttcagatggggtctacagccaacttttacaatcaaccaaccgatcagtccgccaagcagccttcgaagcactttacaaaacttatggtcaattcaaaaatacatttgcgacgacgcttgccactgaaatcaaaggtcataattacttagctcaagtccatcactacgatagtgcacgccaagcagcgctagcacccaaagcaattccagaagccgtctatacaaccttggttgatcaagtgaaccaacacttaccacttttacatcgctatactgaattacgcaaaaagcaacttaatttatctgaattacacatgtttgatctctacacaccacttctaggaaaacccgcattaacctacacttatgagcaggcgcaagcaactgccaaagaagcattgtcgatcctaggacccgattatgccaaacaagttgcccatatttttgatgaccgcttaatcgatgtttgtgaaaaccaagggaaacggagtggcgcctattctggcggcgcttatgacaccaatcccttcattttattaaactggcaagatgatttaaacaacttatacacattggtccatgaaacggggcatagtgtccacagcgccttcacccgtcagacccaagattatgtttatggcgactatccaattttcgtggccgaaattgcgtcaacaaccaatgaaaatctcttaacggaatatttattgcaaacacagtctgatcctaaggtccaggcctatctattgaactactatttggatggttttaaaggcactgttttccgtcaaacgcaattcgctgagttcgaacatgcgatgcatgctgccgctgccaatggtcagccactaactgccgagttcatgtcacaacaatatgcggacattaatagccgctactacggacctgccgtcgttaacgatccacagatcgcccttgaatggactcggattccacatttctatatgaactattatgtttaccaatacgcaaccggctttgctgctgcaacgactctcactaacggcattagcaccaaacagcccggtgctctcgatcactatttagactacctaaaagctgggagctccgcctacccaattgaaattatgcaacaagccggcgtcgatatgacgagtgccgactatctcgaacgcgcttttgcagttttcgaagaacgtctggatcaactcgaagccctacttgctaacctaaattaagcctcatgaaaaaacgccctcaatgattgaggacgtttttttaacggctaattcgtcgatgatataacaatgcaataaagtaaaagccaaactcaatcgtggcgatgaagaaggtcactggccagttcgttagataaccaagccataaaccgagccaaacccctaataacgctgcggcaaccgagattgccaacatcccgggtacgctcttcgctaaatatttagcaatgaacgccggaatcgtaactaagatgaatactagtaatgaccccacaatctgagcagcaatgctgacactgacggctaataaaattaagaaataaatcgatagtaagttggtctttaaaccttgtgcttgagcgccaatcggatcatatgaatcaaataccaagtaccggtaaaagatcaacagcccaatcataattgccccagataagatgattaattgataaacatctgctaagctaatgccaataatcgaaccaaataaaatattggtagcataactagcatttcggtttgaaagggataaaaagagaatccccaaaccgacaaacagacttgaaatcgcactaatcgacgcttctcgccgtgattctttggcactcatctgaccaatcgtgattgaactgagtaacgtgaacaataacatcccattcaatggtgcaattcccatgaaaaccccaaatgaggctccggcaaatccaatttcagatagggtatgcgctagaaatgacatgttccgcgcaacaacaaataccccgattaaaccgcaggtaattgcgataaaagtactggcgacaaaggcatgccgcataaaatcaaaagttaacactcgcttatcctccgctttaatctaattccaaattgggatccaactgactcattggtccggcttcatattgacctcgttttaaaaataggtattgatccgtgtatttccgggccaattctaaatcgtgggtcacaaaaataaccgtcaaaccatgttcccggttcaactctgcaaccaaggccatcacttcttctttagtttcaatatccaaactcgctgtcgattcgtctaaaatcaacaagtctggtttactgattaatgcttgggctaaatacgctttttgcttttcaccaccagaagcattccccacggtcgtcttttgcaacgcggttagatgggtctgttctaaaatttgatcaagcgcttggcgttccttgcgcgatttccacggtaagtggctatcaagttgattcaaactcacaaaactacgaatggacaacggatattcagcttctaaatttctaaactgtggcacataaccgatgtttagcttttgcttatccgggttaaaaacgagttgtccttctgtcggttgtaaattaccgattaataggcgcaccaaagttgttttgccaaccccgtttggaccgattaaactcgtcatgctaccacgtttgatcgtaaaactgagatcttttagtacttgtcgattactaaaggcaagccctaaatgttgtgcattcactaattctgtcattttgaatcctgagcctttctaactgcatcaaattgctgttgcatccatgttaaatatgtttttttagcgggtagtgtttcagttacttgtacaactggcaccccttctttatccgctagttcgtgcatttgtttaataatgggactttcttcttgcttattaatcactaaaaaggcaatctgatgggttttaattaaatcccgcatcgttgtaatatcttttggtgatggatcggtcccatcttcaattgctttggcaaagtgttggttagcgactttgtaacccatttcagccaatgcatagtcaaaaacgggttcactaacagccacttgttttcctttggcctgcgcctttagttgttggagttgtgcgtctaacgaagctaactttttaagatacgccgcaccattttgctgatacgttgccttatgtttcggatcgcgcttgctaaattcagtcactaatcgcttggtcaatgttggcatcgtctttaaatcataccataaatgttcgttagcgccattagattgtttcattaattgactgactgtcaacacagtttggtcatctggttgggcactcttaacgactttgtttaaccagctgtcgtaaccaagcccgttttgaatcacaatatccgccttagccacgagtttagcatcattggttgttgcttcgtatgaatgtggatctagactgggactattgataatcgacgtcacgtgaccttgattacctaaaaccgcttgtgcagcttcaccataaaaatcgagtgacgatacaacttgaatcccactcgccttttttgtactctgaccacaaccagccactaatagcattagcagtaagattcccgccatgattcccaaaccttttttacgcatctttttctcctcttttctaaatcgtaattattacgttttactaaaaatattttacacgagtctcactaattgtcaatcatttttctgaaaacacttaaaaagggattgggacaaagattgcttttgccctaaccccttttttgaattgttgaactttaaacgtgttctgtaagtcattctcctccggttaaccctgagtcgcaaacaattactgcgtaattattcacgccctgtgttaatcctcggagcatcgacttaagccacactctttaattaccagatttgttccactgcacctgttgcttggacaacaaaataacctgcccgtggttgatcttcgtttggtacgtaaatattaatgagatagccttgttgcccaccgcgtgtgattaagccattattcaaatacgatgcggtttgaccaaattgtgagccaacttgttgaaccaccaatttaatcgcttggttgccatctacggcagttgtttgttgtggtgtcgtggtagtcgttgttggtgcactgctgctagattggctcgcagattgactactgctacttgccgttgtagcagttgatgatgattcagcaacacttgcagttgatgaacttccttgtggggactctacttcagttgaagatgccatcgccgctttggagctcgcttttaattggcttgcactacttgaaagttcactttcgcgttttgcaacgctactttcacgtgctttaagactagccgtggttgaactttgcttggcatcagcatcttgatttgccgtactactttgaccacaagcccctaataatagtagtcctgataccaaaactgtactaactgtaaccatctttttcataataccccctccaactcctattgattcatctttattctacgagacccacctcagaatagcaattaaatccacatctgatttaaaaatctttaagaaacacgctgattagcttaacttagcagccacttgcttggcaatcaccatatcagttgggtatggtgtatcgaccccgcgtactttctgataagcatcggcccctttagccgctaagacaacaatttcgcccggtttactttccgtaatcacctgttcaatcgctgttgcacgatcaatttcgatggtggttgtcaccttatcctggtcaatccctgccaaaatttcagcggcaatggctgctggatcttcaaatcccggatcatcagtcgtcaaaatggcccgatctgcatattcattaaggacctgtgcaaacccagcacgtctagaaacacctttatcgccaggactaccgacaacaactagtaggcgtggttgattgtattccttttgcaagaagctcaagagcgccttcatgctggcataattatgcgcgtaatcaacatatacttgaccatgtcctggaacggctaaggtttccatccgtcctggaatctgcaagtcgcgaattccttgttgagctgcgattaaatccgcccctgccaaaccagcaccaatcactgcagctgtcgcgttgctttcattgaaatccccaattaaacgcagttggtaatcaccagaaacaccaagttgaatggctcgttcagaagccgcggtaactttaaaccgactttctgctaagcccgtttctagattttcaaagcggaaatcaaccgccacgggaattgtaggttgataatccgtttcggcaaataagtaaattgattccggagcagtcgtcgtagttgctgcagcatacacatccgcaaaatattgtgtttgcgcgttaatcacacagtgtcgtgagttgaccaataattgtaatttgcagtgtaagtaatcttcgaaattaggatgttcatttggtccgacgtgatcaggtgaaatgtttaggaaaaagccaacatcgaacgttaagccgtacactcggtttttcttatacgcctgtgacgaaacttccatcactaagtgcgtcatcccgttttcaactgctttgcgcatgtcgcggaataaatctaaactttctggtgtcgttaaatccgatttgaagcgatcctctggtttaggccctaagacacgatcaattgttgaaaataatgctgttttttgacgggtcgccgcttgtaaaatcgattgagtaaagtaggccgcagttgtcttgcctttggtcccggtgtaagccacgataaataaatcatcttgtgggtaatcataaaaagccgctgataaaaccgccatcgctttttggacgttcgtgacgattaaggcgttcatcccgttgccttcaacaatcgcttgttcggcaacatatgttacggcccctaattcttttgcatttgttaaatagacgggacgaaaattccctttacagaaaaagagcgtatcctcagttacctgccgtgaatcatacgcgatgccggtcatatttaaagtcgggtcaccattaagcgccacacttttcaataaatgatgctcttttagaattaacgtacatgcatctaatgttaaagccattttcgtcctcctcaaaatccttgtgaatggttttaattatagcacgatttaatcatgctgcgcttgaaacggcttataatcgtagccataaaaaaacgcgccaccgttaagtgtcgcgtttcaattccaactaaaataggttcgtgaaaaattctttgatcccttcaccgattaaaacaaataaattggctttggggtccgccgttttagtgcgtaattgtgattgtggcgcttgtccgatataccgcgtagtgacaccgttcaattgtggcatcacttgaccaatttgcacattctttttaataggtgcttccaattggcgttttgcaccacctttgactgcttggtaatgccagtcaatgttggctgctgtggttccttttggcacccacattgaaatagctttgttcgtaatcaattgcactgtcttttggcgaccatatttaaccgtcgctgtcttataaggtgcgagactctgattggcttgtgccaattgtttttgttcccaaccatcgaagacatattgcattaacttgttagtttcaatgaaccgccggccagtatcttcaccattggcatgcatcaccactgttagaatccgttgcccatctttcgtcgcagttccggtaaaacaatcgcccgctttgtccgttgtcccggtttttaaaccatcgaccacgtagtcttgcggtgcattattttcgccaggtaacattaagttccacgttgacatggccgtttcatcacttgtttgggcgccaaatgtaaaatgcgcttgcttggttgtttcgagaatttcaggataatcagccaacaacttttgcgctacgagtgcgacatctgccgcactcatttcattttcagcatcagccggactgcctggataaacttcagcgccgaggaattcattgttcaagccggacactgaataaagttgtgcgtcttgaatgccccaatccgccactttttgccgcattaaatcgacaaaatccttttgtgaaccggccacttggttggcgagcatcatggctgcatcattcgccgaagcgaccatcatggcttggaaaagtgccttgacggtatattgtccgtccgcttgtagaggcacattcgttaaatccttattttgactcaattgataaatgaggtcatcgggcttcaccgtttgttcccacgttaacttaccttgcttaatttgcgctaacacgatgtaggctgtaatcatcttcgtcatcgaagcgattggcaacgcctgatccgcattttgttcgtataagacttgtccagttgctgggtcgagcgcaattgctgcactcgcatcgatttgaggggtggtcggcaaactcaccggcgtacttgccgctgcaactttggtagtctgggcactcaaaagaccgccaacgggtgcaattgccaataggccgaccattacatattgtactaattttttaaacacaacattactccttaactgattttgcgccagcagtttgaggatcaatccgccgacctaacttcaaaggtaagtgtatcacaaaactggttaattctggcgtcgaatcagcataaatataaccgccatgtaacgcgacaatactttgggtaattgctaacccaagtccagtgccacctgtttcttgtgaacgcgatgcttcaacgcgataaaagcggtcaaagagttggttcaatgaatcacttggaatttgttgaccatcatttgacactttaataatcgcctcttgaccgattttttcagccgccaacgtaatttgtttgccacccttgccatatttcaaagcattagcaattaaattattgaagactcgaccaagcttttcagtatcggcttccatcatcagtggtgcaggattacaagttacattaatctgcatccccttcttattcgcttctaactcaaaactggccgctaattgatctaacatctgctccatatcaaacgttgtcttggtaatgggagtcgatgtttgccgcaccttcgtgtattcaaataaatcctcgactaaaaccttcatttgttgcgccttcacgaaagcagtatgcgtatatttggttagttcttccttggtttgatactgattatcttcaattaaaccaagatatccgatgattgaagtcagcggcgtccgcaaatcatgactgacattggtaatcaattcgtccttactcttttcaatcttgcgttcttcttccattgaacgcacagtactatcaaccagcgtgttcacactatcgatcacgcgttgcaaatcacggttgacacgcaaattaatccggtggtccaaatgaccatcggcaatgtaatgcaactcaccaatcacgtgccacatctgcatttgatggtaacgccgaataagccgccaatagacgactaacacatcggcaacccccatcaagatgacaaaccaattttgccaactccaaatatgccattcattcggaccaattgtaatggcgtttttaatcatccatacgccgccgcttagttgcggattattcacaatcgcctgttgtaacagcaccatgattgataaatttaatagtaataacaaaataaccgtgatgataccctcggcaaagagttcgctcttttccttagcggttagtgccactttttgcaggttcttttctccttgatagtcagccattaaacttctaccttatacccaacaccccagacggtttcaatcactttttcaccatcggttgcttcttcaattttgtcgcgcaaatgacttacatggaccatgaccgtcttggcagagacgatactttcttgtttccagacccgttcaaaaatatcgtccgctgaaaagacccggttggggtgactggcaagtaagtataaaatcccaaattcaagtgcggtgagttggatttgcttgttattaatcgtcgtcacttcatgtgagtcgcgcttaatgataagcggaccaacttctaagacatccggcacttcgttggccacttgttgttggctccgccgtaacaatgacttcacccgcgccatcacttctaatggattgaatggttttgaaacgtagtcatctgcaccggttaggaggccttgaatcttgtccatatcagttgtcttggcagacaccacaataatgggcacttgtgaatccttacggaccgccttaatgacttcgataccactcatattcggcatcataatatccaagatcatcaaatcaatatcgggattcgtggcaattttagtcagggcttctttacccgtgaaggcttgaatgggttcgtaaccttcgtttttaacataaatacttaataattcaacaatttctttatcatcgtctacaattagaattttcataatcgttacctcgtttaatttaacatcattttgcatgattcgctttcattgtaacaaactatcttctacttagagttaaagaattctttaaatcctccccatcatttaaccacaaaaaaaggatttaagtcgtgcaaaacgctcgacttaaaccctgatagaaatgatttgaattaacgtgctgaatagttaggtgcttctttggtaatttgcacatcatgtggatgtgattctgtcaaaccagcatttgagatttggacaaattgtgcattatcttgtaggtcctgtaaattagcagcaccaacgtagcccatccctgaacgtaagccaccaagtaattggtaaattacatcgccgagtgcgcctttggcagccacacgaccttcgatgccttctgggactaacttgttggcttcattcacaccactttggaagtaacggtctgatgaaccatgcgacatagcagccaagctgcccatcccacggtatgttttgaaacgacgtccttgatagatttcaaattcgccaggtgcttcgtcagtcccagctaacatactaccaagcatcacaacgtttccaccggctgcaagagctttaacgatgtccccagaatatttaatcccaccatcagcaatgatggttttgccatattcgcgggcaacactggcagcatcgtagatggctgttaattgtggtacaccgacaccagccacaatccgagttgtacagattgaaccagggccaatccccactttaacgacatcaaccccagcatcatacaaggcttttgtgccttctgcagttgcgacattcccagcaatcaaggttgcttcagggaagcgttcgcgaatttcactaatcttacgtaacacaccagctgaatgaccatgcgcagtatcgataatgatcgcatcagcccctgctttcaataaggctgcagcccgttcaaaagtatcgcttgtgacgccaacagcggcagcaactaataagcgaccatattgatccttagccgcattcgggaattcttgcactttttcaatatccttaattgtgattaatccggctaagcgaccgtcatcaccaactaaaggtaacttttcaattctgttttgttggaggatttgttcagcttcttctaaagaagtgccgacaggtgcggttacaagtgcttcgtgcgtcatcacggttccgatttcagcagagaaatcagagataaaacgtaaatcacggttcgtaataatgccgactaattttagatcatcgagatttgaaacgattgggacaccactaatacgatatttacgcatcaaatcttcagcagcactaacgggtttatccgctgttaaataaaatggatcaataataacgccattttctgaacgtttaaccttcaagacttcatctgcttgacgttcaatactcatattcttatgaatcacgcctaaaccaccttgacgcgccatagcgattgccatgggtgcttccgtaacggtatccatgctagcactcataattggtgtgtttaacttgatattctttgcaagttgcacccctaaatcgacttcgttggggagtacatgactctccgcaggtattaataaaacatcatcgaacgtaaaccctttttttgtaaactttgattcccatgcagacataatcttcctccaatttgtgaactaaattaaccgccgacccatcgattgttcgtattatctttaatcgataaccagtttaaaatttgataaaatattagcagatttttctgcaaacgtcaataaactcttattgaaaattcattttcatcaatatcgtgtacgaatgaatcacgaacatttaaaataagggtgcacaccacccagcttcgttatacaatagaaataactgattataaaggatggattggcatgcaagaacaacaacgggttctagatttaacacgaagttataacctacgcgaattaggcggttaccaaacggttgatggcaagtccgttaaatggcacaaattattacgttcaggtagtttgaacgcgctaaccgcaactgatattgaggatctcttaaattacggtgttgcttacgatgtcgatttccgttcacgtcatgaaatcaaggtcgcccccgacccatttgatgacaaccaactaacctaccatcgtctttcggtatttccattcactgaccaagccgatacccctaaaaagccagccaaaaaaggcctaatgcggctttttggtaaaaaagaagctgctactcccgaacgatcaagtatggaccggatgtaccaacaattggtcaccgactcccatgctcaagcagcttatcgcgatttatttaccgtactattaaataatcacgatacaaacggtgcagtcctttaccattgctcagccggtaaagatcgcaccggtgtcgcaacttttttaattctaagtgctctcggcgtcgactggaaaacaatcgttgccgactatgtcctctcaaatgaggtcctaggactcagctcagcaaccccaacccgaatttcaagtaacgatagccaggtcgcttcaatgaacgctaagagcattacacaggctaatctagaacttgtccgcgacacggttaatcaagaatacggcaacatcgaaaactacctatcaaaggcaatggccctcaaaccagaagaaatcaaacaattaaaagaggactacttagaatagcgtgcgactgcaaatggttgtccgctgaggattagcctaaaaaggcgaacacaagcaattgtgttcgcctttttgaatgatcttttaatgactcttaatataatttttgccatccgctgctggtgcgacggccttgcccaagaaaatcaccagaataataatcgtaatcgcgtatggtgcaatctggaaccagacactattcacaccggccagtattgggatgtagccgccgataatcggcaaactttgtgcgagtccgaagaaaatcgatgcacctgtcgcgccaattggatgccacttaccaaaaatcatcgccgccaatgccatgaagccctgacctgaaatcgtcgctgcgctgaagtttaacgtaatcgactgcgccatcaccgcgccaccaatgccgcctaacaaaccagacaacatgaccccgatataccggtaacgactcacattgatgcccagtgtatcggctgccgctggattttcaccgactgaccgcaagcgcagcccaaatcgcgttttatacagcacataccaactgataatgccgaccaaaaccgcagcgtaagccactaacgacgtcttcgtaaataaaatggggccaatcactggaatttgggccaagccggggaatgtgaagttaccgatgctttgattaatcaccggcgtttgccccttaccgctatacagcacacgggttaagaagacacacaatgcaggcgccaataggtttaacaccgtcccactaataatgtgattagcgcgcaatgttacggtcgctaaagcatgtaataaggagaacagtgcaccaaacagtccaccaaccaataaggcaatccacggcgtcaatccgccaaaaaccgtactaaattgaagggtaaagacggcactgctgaaagccccaacaatcataatcccttctaaaccaacattaatcacaccgctatgctctgaaaaagcaccacccaaggctgtaaaaatcaatggcgccgcgtaaactaacgtggtcgcacaaatcgtcattaaaatcattgtgattgtcattatttttcaagcctctctttcatcaacgcgtgttttttcagtaagcggtgattgagtaattgttcaaataagaagcgcacacccacgaagaagataatcgatgcaatcacgatattgacgatttctgtcggagttgttgagtagacggaaatgcttaagccaccaatctgtaaagcagagaataaaatcgccgcaaagataatcccgattggatgcccattcgctaataacgcgaccgccattccattaaagccgatatctggtaaggcatttgaaacggaaatattttgataattccctagaccatcgacagcccccgctaacccagctagtagtccagataatagcattgcccacataatcgtttgtttcgtattcatccccgcgtaacgtgcagcttgttcgttcaatccaactgccttaatttcaaatccagtcttcgaccgtttcaaataccaccacatcacaatcaccaagactaacgcgatgaaaaagccccagtgaaacgttgagtgattggtaatctgttccaaaaaaggggtccgcaagcttgctttagggacaatgttggccgatgagtcgctgtcttttggcgccaaccaacgtttaatcgcaaaattgacgaaatacaatgcgatgtagttcaacatgatggttgtgatcacttcactggtcccaaagtatgcccgtaaaaaaccggccaaccaagaccaaaagccaccgagcagcatccccgctaaaatcgcgccaagaatcaagagaatccccggtaaatttttaaagtggagtgcaaagacaatcgcgccaaaccagcccactaatagctgacccgacccaccaatattgaaaaagccggctttgctcgcaattgaaaagccaagggctgtcaaaattaacggagtcgcattgcgtaatgtctcgccaatcgaatagatatctccgaatgcgccattaaagaggttactgtaattttgaataggcgaatatccaaaaaccaacatcacaactccgcccactaacagtcccgccacaacggataggattgcaatgattaatcctgaagattgttgtttattcattcgtctcgccctcctactggttgttgcccggccattaataatccgagcgtctgactcgttgtggtttgtggatcaacttcaccaacaatttgaccggcgtgcattacaagtactcggtcagctaactttaaaatttcatctaattcaaaactaacaagtaaaatcccacagccttggttccgttgttcaatcaagctctgatgaatatattcaatcgcacctacatcaacaccgcgggtcggattggcagcaatcaagacttttggttgtttggcgatttcgcgcgcaaccaccactttttgctgattgccacctgaaagttctccggcaagcgtttgttcagattgcgtccgaatgtcgaatcgtttaatcagtttctgcgccgtttgattgatcacccgataattaagccagcctagatgactatacggttgatggtaataatccttcagcgctaaattttcagcaatcgacagtggcaaaatcaaaccgatattctggcgatcttctggaatgcaccctaagccttgttcactaatttggcgtggtgtccgtttcaataatgactgacctcctaattcaatttttccagactgcggttttaattgtccggttaaaacctgaattaactcactctgcccgttgccatcaatcccagcaattccaacaatttctcccgcatgcacggtcaatcccagatcatctagaacagtgcgtttagcaacacgagcagcgacatgttccaccgatagcatcacagcgccttgattagccattttcggtgtgggggcttgttgcggacggccaaccatcatttccgctaattttgtcggatccgtttgtgcgactagtaccgtatcaatcacacgtccggcacgaatcacgacgcaccgatcagcaacttgtttaatttcctttagtttatgcgtgataaaaatcaacgacttcccttccgcctttaacttctcaaaaatggcaagcaaggcttgaatttcattcggtgtcaaagctgcagtcggttcatcaaaaatcaatgtcgttgcttctcggtaaagcgccttgataatctcaacccgctgttgcatcccgaccgaaatatcagcgatttttcgatcaaggtcgagcgccagttggtatttatcgactaaagccgtgaccttttgccgcgccgttgcatagtcaatccgtccctgtttagttggttcgtcacccaggataatgttttctaagaccgtaaaagccggaattaacatgaaatgttggtgtaccatcccaatcccgagggcttttgcatgtcgagggccatttaaggtcactgcttgtccgttcaccagtaattgccccgcagtcggctttaattgtccggtcaaaacacccatcagggttgatttccccgcaccattttcaccaagcaaggcaaggatttcaccctgttgcaaggttaatgaaatatcatcattggcggtaaaggcgccgaaccgttttgtaatgtgctgcatttctatcacagtttttgccatttttacgctccattcattaagcatacaaaaaggatggctgataactgctgccatcctttagcattcaatagtcgttattctgcagcaactttaatggtgcctgcttcaattttttgttgatattctttgactgcttgccatgtttcaggggaagcattgtcgttcactaaggcaacgcctttgtctttcaaatcatatgtgacggttttgccaccagggaatttatcattcttagcttggttagcaagatcttccactgctgtgccaacttgtttaacggcagatgctaatgtgacgttgccaccatcatatttcccatcggctttttgatcttgatcaacaccaatcacccagactttttgaccacccttagaaatgttcttagcagcggtaaagacgccagcgccagtgccaccagcagcgtgataaataacatccgcgccgttgttgtacatcgcggttgccaatgattggccgacatcggctttcgtaaatgaaccagcatatttcacatcaacggtgattgctgggttaacggctttcaccccttgtttaaaaccagcttcgaatgttttcacgacggcactatcaattccaccgacaaagccgactttattcgtcttagtagttttcgcagcggcaaccccggctaggaatgatgattgttctgttttaaaattgacggacgcgacgtttttccgattcttaacgtttgaatcgatgattgcaaagttaacatttggattattctttgcagattggctgaccgcgttatctaacttatagccaatcgcaaaaatcgtttggtattttgccttgattaacttattaatgttcgggaaaaagtccgcatcagaactcgattgtgcgtaattgtaaccattgaccccttttttaagatcatgactagcaccccatttttccaaaccttcccaggcagattggttaaaagatttatcatcaatcccaccaccatcagtgactaaagcggctgtgtgcgttgctttctttgatgctgtcttttgactcccgcacccggctaacacgccacctaatacaaggactgtcgagaaaagtacgaccaaactttttttcatgaaataagcctccgtcaataaatttgataatttattataaacacgttatcgacataaaatcaatacattgatttcattttataaaatattgttcgtttatattgtatttgttgctaagaaatatagataatgctaatattaattgataactaacgaacaatcaggaggcgaaccatgcaaacacaagtctattttaatcacgatggcggtgttgatgatttgatttcattaactctgctcctacaaatgccgacaatcaaactacttggcgtcggcgtaattggcgctgattcatatgtcgaaccagccgttagcgcgagtcgtaaaatcattgatacgttttcagatcaatcagcgcggttagctgtggccgcttctgactcacgcgcagtccatccttttccaaaagaatggcgaactgacgcttactcagtcgatgcacttcccgtgctcaatgaacgtggcaccgttcaaacgcctctgagtcctgaagccgcacatctcgatctaatcactaaactcaatcaagcaaccgaacccgtcacattgctctttaccggcccattaactgatttggcacgcgcactcgccatcaatccaagcatcgaatataaaatcgctaaacttctttggatgggcggttcttttcttgaacaaggcaacgttgctgaacccgattctgatggtactgctgaatggaatgccttctgggatcccgaagcagtgaaaactgtcttcgatacacaaatccctattgaattagtcgggctcgaaagtacgaataatgttcccttaacgccggcgattcgccaacgttgggctagtaaacgtgccaatgccatgatggactttatcggcacctgttacgcctttgttcctcaactggtccatttcaaaactaattcaacttattatttatgggacgttttaacaacttgttaccttcttgatccaacaatcgttaaaacaaaagccattgtatgtgatgtcattccaaacggaattgccggcgggcgcacgttcttaactaaaaacggacgtccggctaaactcgtctacgacgttgatgcagctggattttttgatctaattgaaaccatcataaaagcagactaacgcaaaaaggagcaccgacttatcagtcagtgctccttttttgaacgtgctttcatcaacagcttcctgtgctttgctacacttagcaaagcggtgcttgcagcgccaattcgctaagttaggcaaatgctcagaagctacccgttgatgacgcactccttttttgaacgtgcttgctaaactaggggaacaactttgtaaaggggctgtttgaatgacgactgatttcaatcaagaacaagcgcatctatccactgtttatcaacaattaaccaccactttgacggccatcaatgatgcccaatcgcaaaaccagaaaaacggcaacaccatcaaagcgcagatcaccggtgaagccaaactcaatttcgattcatacgctgataatcttgatacattcgctgctttagaaagtatcaacaaggaaatcgatatgctcaacctgaaaaccgattcgctcgttgcacgtcatgatgagaccttacggctgttagagcaaccctactttgcaaaaatcacgctgacttttcctgaggaaatagacgccgaagatttttaccttggttcagctagcttcacaaaccaagccggcgatcctgtgatttacgattggcgttcacctatcgccgatgtttattaccagcaaacattcggccccaccagttatcaagctaacggtcgcgccattgcggtcaatctcgaccgacggcgccagttccaaattcaagctgatcagctaatcgatttctttgatacgcagattgccatcgaagatcccttgttattagccactttaaaagaagccaaaacaacgcaaatgagcgccattaccgcgacgattcaaaaggaacaaaacgcgattattcggcaacaaacgactgaccatttactcatcgatgggattgcgggcagtggtaaaacatcggtcatttttcaacgcatcgcctatttcaagactatatcgcccaagttttaccagacttaggtgaacaaacaccagtcaacttaaccctacaacaactattggcgcaattgttaccttctgatctagccgcactccccatcgctgatcaaccagctactttgaccatcacacaattaacgttgcaggcgagcgatttccaatctttaagccctggtttaccgctgacgattgatgccgcaacaagctaccaattcttcttaaaaacaccggtggataccccgcttgataaacgaatacaagcaactcagcaacaactcacaagttgtctacaggaaagcatcacaaatgaagcccaatcagcagatgctttaactcaacttgaaagcctcactgaaaccgagcaacagcgcttattcgaccgcttaattcgcgaagatgaaccactagcaccgctagcacgcaaaatgattcgtcatgattaccaagacttagctgatcagctaagcggttatcaatggcttgcttttgatcaaataattgcccgtcaaacaccgattgatgctgttattgcagctcagatttatgcttatttaacgcatcacgtcttcccaaacgttaagcaggtctttatcgatgaagtgcaggactatcacgcaagcacgttatctctttttaaacaacttttccccaaagcacagttcacggttttcggtgatcagcatcaaagtatcaccccgcataaagtacaattcgaacaattacccaccatttttccacaactacaaactgcggcactgcgcacaagttaccgctcatccggtgcaataacgacgttatttagtcaactattcaccgatttaacagatgtccatgccgttcaaccagcaggcaagcggccaacgacgatttgtgcgactgattttaacgactacctcacccaaatccaagctcagattgaccaactaccaactgaccaaaccttagccatcatcacgcctgctggtgactttgacgagcggttaactggcctcaaaaatgtccaccacttatccacagaaacgacgaatctccccgaaaccggcgccttcactttaccgctgacgctggctaaagagttagaatttgataacgttttgttgtacgatctgactaacaattattataccgagccaactgtcggccacaaccgcctctataccgccatttcgcgggcaacgcatcaattgacgctcagcgcactgggcaagttgccggttgaattaaatggccaataaattggtcatttgactgactaggctagtcctcaaaatataaacgctcgctgtcgcactctattcaaatacaaactgattgttgtacagttcggcgtagaagcctttttcgtctagtaattcttggtgactgccttcttcgatgatgcgaccgtctttgaggacgataatgcgatccgcattgagaatcgtctttaaacgatgggcaatcacgaaactggttcggccttggatgacgttgtccatcgctttttggatatgactttcagtcaccgtatcgacgttacttgtcgcttcatccaaaattaagagcgctggaccggtgataatcgtccgggcgatactgatcaattgtttctgaccggtactgaagatgttatcttcttcactgacagccgtttgataaccatcatctaacgtcatgatgaagtcatgaatgtgggcttgctgggcagctgccaccacttcttcatctgttgcatcgggtttcccgaagacaatgttgtcgcgaatcgttcctgagaaaagcacggattcttgcaacacgatgccgacgtgcgagcgtaatgcatccaaatccatttcacggatatcaatgtcatcaatcttgactgcgccttgatcaacatcatagaaccgattcatcaagttcatgacggttgtcttcccagaaccagttggaccaaccaacgcaatcatttggcccttatccacttcgatattcacatcatgcaaaatttgcttacctggtaaatagctaaagtcgacatgttccatggtcacggagcgttcaatgccctcaaattgcacaccgtcggttggacgcacttcatcgtcttcatcaaacacttcattcactcggcgggcaccggtaattgccaattgaatcatgctgtaactcgatgaaagttgtgcgatctggttatagaattgttgtgaatattgaacgaatgttacaactaagcccaaagcgatcgactttttaatgtcaccgttcaccgctaaccagctaccataggaaatcacaattgcggtattcaccaacgacatcccttgcatcaacggaaagatcatcccagaataaatctgaccttttaaagtcgccttgcggacattttcattatgttcaatgaagccatcaatcgtttcttcttgaaggctgttagtaataatcactttttggcccgtgattttttcgttaatgtagccattgagtttcccgacttcatcttgttgcacattaacgtatttttgcgctttattaatgatgatccaagcaaggatgaatgaaattgggacggaagcaattgtcacccaagcgagctgcacatcttttctaaacatcataatcaataaaccaattaagagcgccgtgcctgatacaagttggctcaacacttgattcatcgcattgtaaatattatctaagtcactcgtaaagcggctgagaatatcgccatctgaatgacggtcgaaatatttaatctgcattttttggagcttattgaataacccaatccgcatccggttggttgataacgcgttgacgcgtgagaaaaccgcgcctgataccaacgtcgctgctgaactaaagacgtagaataaaatcaacgatacaatcacctctacgaaggcgtctttagatgccccactggttggcaaatgttgggcttttaaaatttgaaatttcgttgcatatttgactaactcattgagcgcgtccccgatatattcgggtgctttcacctgaagataagtcgccatcacagtcatcacgaggatgattgcaaaagaaggtttataccgctttagataatggaaaaagaacttcattgctcggttaaattctcgcattggttatcctcgctttcctttttgcgtttcaaagatttctcggtagacatcactggtttcaagtaattcatgatggttaccaacaccgactaaacgaccttcatctaacactaaaatccgatccgcgttgaccacagatgaaatcttttgcgcgataattagtgttgttgtgccagctaattcacggtctaacgcctctttaactaatttttcagaccgggcatctaaggcactagtactatcatccaaaatcagaatcttcggttgcccgattaccccccgtgaaattgagagccgttgtttttgaccaccagagaagttcgcactgcgttcttcgacggttgcatcatattgatcagcaagcttttcgatgaactctttggcttgggcaatccccgttgcgcggtccatatcggcgtcatccgcatcttttttcccgtgcttcaagttttgtgcgattgtgccggagaataaaatcgctttttggaggacaaatgaaacggcgctgtgtaaattatgttcgtttaaatctttgattggcacgccgccaattttaatctgcccttcagtcggatcgaacaagcgcggaatcaattgcgccatcgttgacttaccggccccagttgcgccgacaatcccaatcatttcaccagcgttaattttgaaattaatatctgttaacgtgttacgatcgtcttctggataacggaagctgacgtgatcgaattccaacgtccccgctaagtcttgatcagggacatctggataaacgatatcaggctctgttgaaagaatttcttggagtcgcttcaacgaaactgccccacgagatgccatcatcatcatcatgccgcccatgatgatcgacatcatgatttgcattaagtaattcataaatgaggcaatcgccacaatcgcttctggatccgtatcgactaagttcccaacgaaatagattgatgcgacaaccgctaagttcgccaccaacatgaacgctggaatcattacagaaaaaagcatcccgacgattgtcgtatggtgttctaattgattgcttgtttttgagaagcgactgatttcgttatcttcttggacaaaagacttcacaatccgcgtgcccattaaattttctttagcgaggttattaatcttatcgattaaattttggatggcaccgaagtgtttccccatcgaacccattgataagaatgtaatgatgaagaccgcgatcactaagagcacgataatccaccataaactcggaatcgaattcatcgcaaggatgaaactgccgacaaataaaatcgggattctaaaaatcgtttggagcgtcatcataatgacgttttgaacctgggtcatatcattggtcaaacgcacggataaattcccaactgagaatttttcaatattggcaaatgagaaagtctgtatcttccggaaagtagtttcccgcatatcggcagtcattccctgcgccgtcatcgccgacgtaatggtgttgaccacgcccgcaattaaaccaaccacggcaattacaatcaaataaattccaatttgacgtaccttatcttgatcgcctttcataatcccttccaaaacatcttgtaatagttttggttgccatagtgaagacgcaacagaaataaccgtcgctaaaatggaaagactaaacacgccccaataaggctttaagtgctgtttaagtatcgacatgagcatccctctttttctgtagttgaatctcctgtacaaatcctgtacagtataatcgaacagtgttcgagttactactttatcaaattttaaaacgaattacaatcatcttttcataaaaagtgaaggagcttcattaatatggtaaaacagtcaatctctgccgagcaaatcatcactgccgcgtttgaaattttacaagtatccgggaccgtcgatgccctttcaattcgtaaaattgccaatcaattagacatcggggcggccacattttactggcatttcgaaaacaaacaagccctcctacaggcgatggctgataacattattcaacaaattgagattgagccatgtaacacaaccttagaatggacagaccaaattcgccaaatttttagcgccatttacaccacttacatagcacagccctatgccgctgagttgatgatgcggaccgtccctgcaactaaggcccgcctaggtcttatcaaccacttaattcaaatccttttggatgccggtttcacgccagaacaagcaagcctagcgattgaatccatcgatcacttcatgtccggtctcttcactgacatcaccggtgagcttgagatgaaacatcgcgtctcacaacataaagacacttatcttgcacagttaccgcttaaaatgcagcagattgcgactgacaatcattacaatgctttcttaaaaacttttgaacatcatcggcaccaacaacaacgctcactggaaaaattcatgctaggcctcgatattttcctcgctggtttgcaacaacaacttgcttaaataaaaagcgcgcagacaactgattgtctgcgcgctttttacatttaaactgcttttgaacgaatcccgaatccataactcagagccatcacgccgacaatcatgatcatgtataacggtaatcgagtgttcgatcccgtatgcaatagactcatgccgtacgttaaggcgctgattgcgaggtagtagccaaaactaaacaacccgctggccgtgccgatcacatcttcgtaacccactaacgctaaattcaagaccaccggtaaggtcgtattcaatccccacaagaaaagaggccgtgggacgacctcttcttttgtgggtttctagctttaacgcgctttttgaaactgacttctgtgcttagctccaatccgtaaacaatcgactacgtcgctcatttacagatttaggctagtgctcgaagtcaaaacgtttcaaacgcgcttctatttctttaacgtgcttttaattcgcaaccttctgcgccttgctacatcaaccagacaatcgcccttggcgcttatccttctgattaggcaagtgctcaaaggctaaccgcgaattaacgcactcatttttttaccagcttgcttttttgacgcctgggatttggcctttatgggctaattcgcgaaagttgatgcggctcataccaaattgccgcatgaaacttcttggtcgaccatcgattacatcgcggttccgcaatcgcactgggctagaatccttgggtaattgagaaagagctaagtaatcgccctttgcttttaattctgcgcgcaagtcagcgtatttcgctactaatgcgcgttgttttgctaattttgccacttttgatttttttgccattgataaaactcctttttaccgtgctttcaaaagcatcctgttccggttagctacattagccaaacaatcggttacgccgctaatttggctaattaggctaatcctcacaggataaccacttttgacgcactcattttctttaacgtgcttttaattcgcagacttctgcgcttagcaccgtgaatcaaatcatcgacttcgtcgctaattcgcttccccgtactaatactcaaaagttgattaagcttgaacgcacttttccccgattgaaatagcctacgctaactatttatgaaatgcaattaaaaagacttataaaaagtaaccatttttcaacactggcctgtgctatacttaatctaagttgatttcacagaaaggggcactttcagatggcccaaaaaaacattctccaatacttaattctcgggctgttaaatcagtctcccaaaaccggttatgatttaaaacgcgtctttgaagatgatatcggtgagttctggcaagcccaacacagccaaatctatcctgaactcaagcgactcgaacaggctgatcggatcacccacgtcgaattgatcgccggaacaaaattaaaaaagaagcagtattcaatcactgcagatgggattgccttttttgacgagtggcgatactccccaaccagcgaaattattgccagcaaagacgaatttattttgaagctatactttatcgactcaaaaaatgatgctcatttagacgcaatgttcaccgaacaaaaaaacttacaccaagccaaactagatcacctactcgaccggcgtcaaacccttttcagccaacaagctgcggtggatgcgcactatggtcattatcttattttagaacacgcgattaaccgcgaacaagactatcttaattggttaacaaccgcacggccgtaaaatcgacccttaacaaatttgagataagtgctatcctattagtaagaagtaaatcaagttaggctgtttcttcatttgtatacgttataataacgcgcttgtacaggtggtcagttgaccaattgtatgggcgctttttttatttgatccagcaacctagactttaacaaattcaggaggaatattattttaaagcgcaagaatgttgataaagtcgtcttcatccccacgatgttactgttcgggattgtctccgcatttttaatgttggggggtgacacgcttcagcagtcgatttcacaactacttgatgtgatgacggcacattctaaatggctttacattggtatttatatcattaattttattttcctattttggttggggtgtagtcactatggccatatccgccttggccaaccaaatgaaaagccagaatataacgacttccaatgggggagtatggtttttgcaactgggattgacgctagcatcttaatgcttagtaccactgatccactgcaatacttacagaacccaccatttggcgctaaacctttctcggctgaagcataccgctacgccaacgtctgtgggcaatttcactggggacccatggcatggatgatttttgccaccgcgactgtcgcaattggctacgctctctatgttaagaacttacgggtacaacgtttaagcgccgcaatcgacctattagaaggaccacaaccttacaaaaaaataattcgcaaattaatcgactttaccgttgttttcggcattatggggggcatcggctcatcaatcggaatggaaattcccgtgatttcaaaagtcttgagcacaatgaccggtttgaatgataccatctggcttaaacttgccctcttcattatcttactggtgctattcaccctcacggtatatgccggcttagataaaggcattaagaagctcagtgcttggcatatctatactgccattggctttttattactcgtcttactaatcggtccgacattcaagctaattggcgctgaaggccgcgatgtcttccatctctttggtaacttcgggcgtttaagtttaaatcagactggtgcacacagtgcgttcgcacaacacgaaaccctcttttactggggatggtggttatcttacatgcctgtcatgggcttattcatcgctcggatttcacgcggccgaaccattcgccaagttttattgggaatggcgacatacggcgcatttagttgtatgagcttttacgctgtacttggcggttatgcgctcttcttacaacgttccggtcaaatcgatcttgttcatctattgaatacccaaggacaagccgctgtcatcgcggcggtcatcacgaccttaccgttcaaaattatcatgttagcaattttctgtctgtcatgtttcattttcctggcgacaacgatctcttcttcggccttcatcgtctcatcatttaccagtcttgaattgaaaatcggagaacaacctaatcgttggaatcggatggcttgggtgatcattttcattctattttcacttggaattgtacttgtcggtagtttccaaaccattcaagccgtttgcgtgattgctgggttcccattgatttttgtctgcgcattattgctcgtttcgatttttcacgccgttcatgatggcgagattcccattgaaattgaaaaagaagaaacttctcattttctgaaaaaaaagcttacgccgaaattttttatgtgatacggttatatctgttaacttttcagaaagaaggaatttaaaatgccaaccaataaaaaagaaggtattatttttacaacattaatgtgtttctgcatggtacttggaatgagtatctataacttagttttacatgatagtctatcatggggtgctttgtctaccggtttaattccaggtttcatcgtcgcatttattctagatgtattcgttgtcggtgcaattgctaaaaaaatcgcatttagcttaccattgaacaaagaaaataaattagtcatgattctcacaatttcatgtttaatgattctcggcatggtcacatgtatgtcacttttcggaattctcatcgaaggtggtatccctgaccacttaggtagtgtctatcgtcacacatggttgatgaatgtcatcgtcgcattaccattacaactgatcatcgtgggacctttctcacgcgccattcttggtaaaatccaagcaaacgcagccgcaactgaaacagctgaataaaaacaaaaaaaaacgacgactagcttacgtagctagtcgtcgttttaattatgctaatattttttgaatagccgctaattcttcggccgtaaacgttaagttatctagtgcatgcacactgtcttgtaattgactcaagcgcgaagcaccaactaacacactggctacagtcggctgttgtaaattccacgcaagtgccatttcagccaatgattgcccacgttgttgcgcaattttgttcaattcttgaaccgtactgattgtttgatcaaccttttcaggtgataggaagggactatctggacaagctgcccgcgaatcggctggaatcccgtttaaataacgattggtcaataatccctgtgccaacggactaaacgtaattgcaccgataccttcatccgccaagacatccgttagtccatcttcaatccatcgatcgagcatgttataacgtggttgatgaataataaagggtgtcccgagcgctctgaaaaccttcgtaatcgctttggtttgttctgccgaataattcgaaatcccaatatatagcgcctttccttgttgcaccaataaatctagggcccgagctgtttcttcaattggcgtatctggatctggtcggtgatgatagaaaatatcgacgtaatctaactgaagtcgttttagtgactgatcacagctagcgataatattcttcttagaaccccactcaccatagggaccgggccacatataatagccagccttcgatgaaatgatcatttcatcgcgatagcgacgcagattatcatgtaaaatgcgcccaaagttttcctcggcgctgcccgctggtggcccctaattattcgccaaatcgaaatgagtgatgcccatatcgaacgcgccaaaaatcgtttccttttgagtcgccatcttatcggtttcaccaaagttatgccataaccctaatgaaatcgctggtaatttcaacccagaatgcccgacgcggttatattgcatcccttgataacgggtttctaatgcgtgatacatgtacaacgccttctctactcaagtattttgactatttagccgatcgtcttaattgcgtcttccactaatccccagaacttctgatgatcgagttttacagcgactgatgtgtgacagtctgttggaattgggaatctaaaatcggcgaccgtcatcccacgcgtcaatgttccattgagttcgatatcaacgggcactttcttagtggtcatcacacttggatcaatcacgtaagccacggcacatggatcatgaacgggcggtacatcgaaattttgccccttcttgtacatatcgcggaaaaaggctaacaaatcaaccacgaactgagacgtttcagtatgaatgccttcaatttgttcaacaatatctggtgtcgctaacgcttgatgcgtcaaatccaaaccaaccattgtgacatcccagccggcattgaatacaatcttggccgcttctggatcaaatttaatgttaaattcggccactgcactcgcattcgcttcgtgataaccgccacccattagaacgacttctttaacgcgttcaacaatcttaggttctttgcgtaccgccattgcgatgttggtcaacgcacctgttggcactaatgtaattgtattagctggatgcgtcataattaaatcaatgattaaatcaactgcatgacttttttcaagcgccaccgttggttctggaagaacaaccccgtcaaggccagtctccccatggatatcagctgctactttaatttcttcaattaatggtcgcgaacacccagcagcaatcggtacatcgtgcatgccgatcatggtcgcaactgcgagggcattgcgcgtcactttcgttaacgtctgattggcagccaccgttgtcactgccaacaaatcgatttctggattgccgtatgctaacatcattgcaacagcatcatcatggcctggatcacaatcaagaattattttctttgccattcgtaaaacctccactctctttcacttcgtgcatactatcactatagaatttaagcggtttcaagtcaaccatatataataaaattcaatcatgaaacggagtctattatgcgcattgatactggcgaataccctaccggcgaaaacgccgtccaccctaagaaagttaaacgtttaaaattacttagcaaggttgcaacaatcacctgtattacgatgtatgtttcatacatcccccaaattatcgctaatttttcagggtcacctgtctcacctttacagcccttagtcgcaacaattaatgggtgtctatggaccgcctatggctggaataaaacctataaagattggccggttattatttctaacatccctggcgttattttcggactcgttaccgtaataactgtttatattcactagaattgtttgttaaagccacgatttgcgtcaaataatttttgataactaacagaaaagcaatccatcataagttgcttctctgttatttttttatccctttacccaaacataaaaagccaaggtgattccttcttttatcgaaagaaaaccatcttggcttcactttgaagtaccgactatgggactagtcggccttaagcttgttattttgctgctcgtttaacgtatgtgccttcttgtgtgttgatttcaaggacttcgtcagcgctgatgaaatcagggacactaacgactaaaccagtttccatcgttgcaggtttacctgaaccagtcactgttgcgcctttaatcgaaggttgtgtttcaacgacccgtaagttaacagtagttggtaaagtaaccccgatcacttctgaaccgaagaattgaatcttgcagttcatgttttctaataagtattttaattcagcttcaatagcagctgtttgaatttcatattgttcgtaagtttcaagatccatgaagaatgccacgttatcttgtgtgtataagtattgaacatcttttgtatcaatcattgcttgttcaactttaacttctgggcgcattgttgtttcaacaattgagccagtccgtaagtcacgcaacttaacacgcataaccgtgtttcccttacccggtttatgatggttagcttctaaaactttgattaacttgccgtcttgttcaaacgtcattcctgctctgaggtttactgcttcaatcatgacttgatctcctttatttaaaaaaatattcatctctaactgtaccaaatgaaagccgtttaatccagccctcctgtggtagttatcctatttaatgtcgagtttatgaatcttatccgctggttgtggctcataatgttggtacatcttcgtaatggccaccttaggtaagcctgattcactaatataaatattaggtttgaggtatttcttattttgcacatcttttaagtgataatgttgaatcacttgtttctgatggccagtcggcgcttcatcttgaccatagaattgaatcttggctaatggtaagctaatcgttgcattattaatcttgaaataagcaacatctcgattgctgccaagatacgtcatcttttgttgcttatcagcttgatagaattgctcgatttgcttcatgctgtgattatcgaccagccggacaatcggttgatcacctttgaaaaggtgtaagccatctagcgactggcgcacgttttgagcactcaacatcaaccagacaatcaccaacatactgataaagtacacaatatgtaagctaagactgctagcagcatgattcaaactaaaagtgtagctatcctctagctctttattcatgatttggcgccgaatgcgcattgcaataatcttatacgataggtaccacactacaagcgcgactaaggttgccccaaaagctgtcaaaattgtattttttagaatttctgaatccgtcaataatggactaaagccgctcacaagtttaattgtgagcgcgccaaggattagaatcacaaccatttgtagtacaaaaaaacgggtccgaatacttttgctaatctttgtgggtgttaccactttcgtcttatctcccataccataaatcctcccttgttaacctacttaccattttagcataccgtttccatcaagttgattaaaagtccctcgttggcttattttttacaaaggcatctttcttcaaaggtagctgttcaatatgataaggtgaagttaatcaaacggaggtgtcgatatgttatatccagaaagtttaactcaattaatcgccgattcaaatcagccagtcatctcgttattcattaacttagagactggcggacaagccattaatgcgaacaagattaagctcaatagtttttctaagcaaatccgtgaacagttaaccaccgactatcctgaagaaaaaaccttactcaaccaacttgaggacttactaagtaccgctccccaagaattagcacatatacagtcagttgcgttttacatcacagctgctggtcactacagccaaccccttcattatccgatcacgactgaatattttctaattgctgatcaacccgagctgcgtccactcagttcggaattaagtctgagtctgaacgggaccattctctgtctcaacaagactacttttagtttgaaatccattcaacaaaatgtcattcgggattatcctttacctaaagacgccccaacaaccattgaaattgggattggcacagagcgtaaaggcgaagtcgtccaaggcttctcaagtccaacccacagttttgttgtaaaagaaaatgaacaacttatcgatcaaactaactatttccgcgtgattggccgctatcttgatgacttgctgcctgaaaaagcaccgatttacgtggtcacattacccggcaacttaaatctcttcaaggaactcgtcgttaatccaaactaccggatggatcaagccatccaaacttcccctgattctctttcagatgacgacttactcgacaagttactcacaaatgcgcgtcatgaactccgacaaaaagcgctcggattagcagaacgggccgctagtgcgtatcacggcgattcaaaccttggtgatcctgagattattctttcacgcattaacaatcgccaactaacagcactcattatcccaactgcacttgcaccatcagcaacaatcagcgccgatcaaatcatggatcttaatcacatgatgattgcggccatccaaaccggcctgccattctacccagtaccagttgaaaatattccgacaggactggtggcgatgggaatttaactcttaaaacacgtgccaatacagcaacgtatattcaagcgttgttgtactggtccgtgttttttgagttgcaaatacttgatctagataagctgccagttggtccgttggtaattcttcgtaataggcctccaaaaatggcctgtcgaaaacttcacttgtttgatattgaaaaatttgttgactaacttggtagcccgcatcttttaacacgttttccacagctgggatgatttccggtgtagtgttgggatcttgctgttcaatcccaaaataacgttcaagcggtgtgaacaagtcgtcctcgtttttagtgagccgtaagaatgcacaccactgacggctcttttcgctaatcgtcagtaatgcttgattggcttcgattgccggatttaacgccatccaaattaaatcatagcttttttgtggcgtttgcgccataaagtcagccacagactgctgttgataagcaatctgttggtctggtacatgctgtttagcttcttgttgtgcatactggagcatttgcgccgagatgtcgataatcgtataagcctgactgttttgcactagaggtggcaaataacggccgctaccaccacctaagtcagccactgtctcaacaggcagtaatcgccgatcctgtaaaaaagccacaacgtcagtgacaatcgacacctgtgactcttgttgaatctgatagtattccgctgcaaaatcatcccaaaaagctgcgacttcattatccacagtctatcctccgcttaaacttttattttctcagcttagcatataaaaaagatgccgacaaaataaattatcgacatctttttgaaacgtgctttttggttgcaccaacctccgcttaatctaaaatactcagttgctatccgcgaccgaacacacgcttttttaaacgtgctgcaatcgccatattcttccgttgttaggctaatcctcagaatatctccggcgattttcgcactctttatctcactaccagcactgggattggtgcgtattttgccatgtaggcggcttggctgccgaagtatttagcaacgcccttttgtgatttcgaaccgacaattaacaaatcgggtttaaccttaggaatcacatcttcgataatcgcttcgcctggttcgccttctgcaattactgttcgcacatgattcacaccgcgcacataggcttgatcttgatattctcgtaggtggttttcaagatcctcatattggccgtggataaaatccttgttcaatgcttgatagacgttcatttcgtcattttccaataccgatacaatgactaattctaaatcctcacgtttagcccgctcaattgcataatcaaacgctaataacgcatcctctgagtcatcgaccccgactaaaattcgtttaatttctaaaactgacatgtgaccaacctccaattaattttcagttgctaattgctgttcaaaccgcttattgcctttatacaattcaataatcatccaaaccaataatgccatcacaccagcaatcaacacatatgcaatgcgatcagcagtagccaattgtgcagcacttgcgtgatcaccatagaaagcttcgatttgtcctggcaaccccatcatattcaaataggtcaagccaatgaccgataaccaacctaagcttttaatcaaccaactattcttgaagcgatcccccatctcaacccggctgtcggtaaacatcaacagtggcagcattgaaaatggtaaggcaaacgctaagaaaacttgggaattattcatcaaggtattgagcgcctcatgctcttccaaggctggtttattgctggtcatcatgacgcagattaataccggaatcaccgataacaagcgggttaccaaacgccgcaaccacaatggcattctcaagtgaatgaacccttccatgatgacttggccagttaacgtcccggtaatcgttgaattttgcccagaagcgagcaatgcaacggcaaacaaagttgataagattccggtccgggcaacacttgcaagaattccgttactcattgttgaggtatctgacaaagcttcaaataacccgaagaatgatggatctttaaccgttcccattttaaaaactgcaacccccatgattaataacaacgcattaacgaaaaatgccatcgtgagttgaatgtttgaatcccaagtggcaaagcgcactgtttgtgcaacctgtgcttcgttcttgcgatcaatcttccgtgtttgcgaaatcgcagagtgtaaatatagattatgtggcataacagttgccccgataatccctaacgcaccagtcaatggggttagtccaccaacagctggcccggtggcaaaggtcttagcagttggtactagcccaacaatcacccctgcccaatcaggatctgagagtgctacttcataagcaaaaaccacaaaaatcacgacaattaatgcgacaacgattgcttcaatcttacgaaaaccaattttcgttaagagtaataatagcatgacatctaaaatcgtaatgaatactgcaatcagcagtggaatcttaaataataagtacaaagcaattgccgccccaataacttcggcaatatcggttgccataatcgctaattctgtcaaaatccacaagacaatgcccaacggtttactcgtccgtgcgcgaattgcctgtgctaagtccatctgagttacaatgcctagtttagccgccatatattgtaataacatcgcgattaaactagacaccaaaatcacggacattaacaggtattgaaaactctgaccaccagtaatcgatgttgaccaattccctggatccatataacccactgccaccaatgcacccggtcctgaatacgctagtaacatcttccaaaagcctttgccctctggtacttcgaccgtcccattaatttcttcaagtgatgggccgttcgcatattcaatcagcttgtgcttcttgcccttttcttgttgattcattatcctcactccttattttgatcttgataacagttttattgtacgccgttttaatgaaatgtaaataaaaagttaggcaatgctaatttattttattcaaatcgataacaaatttattaacgcaagctacaaaaaaagcgccgtcgaaattattctcgacggcgctttacatactgctttaatcatccatttctttttcaattagcgcgccagtttcagcgtctaatttaacttgcattttttgctgtttttgatgaccttctacttcccagactgttcggccatcatctttttccaatgaccatttgatcacgttcccggtgaagtattgttgcgctttttgaagagcttgttgaggcgtcaacaattggtcaaacgctaattgcttttggtgtcgctcgacgccattttgttcatcggcatcaagggcttctttcgacaatcgactggttgcgccagttcgagcatccacatgcatgtgaagctcttcattgtcgttcattcccgttaattcataaaacatttggttaccccattgcttcagctcaacctcggttaaatctgatgcaggatattgttttgcgtacaattcacgggctttttcaagcgtcactttcggagcttgaaccgtttgttgcggactagtcgattctttttgagcggggggtgctgaatgttttgtttggttggctgtacaacccgtcaataggccgagcgttactaaactaacaatgattgttgttttgcgcatcctgttctacctcgctttgttttgatacttaaggataccattcaacagggtaaattaaaaagcaatatcccttcctagagcaatgttgtccccactttgaccaataaaccaagcccatacacgatgatgatgatggcactcactaagttgacgcccatcaagaattttggtgaaacttttttccggaaaaggctaaagataatggcgataccaaagaaccaggtcgcggttgccgaaacaacccccacgatgaatggaatcgcctcgctactcgtcatgccaccccgcaatgcgcccagcattaatgtcccatcaatcaaggcttgcggattaccccaaaccgccacaaatgcagtcaaaataaccttctccagtggcattggttctaacgcgccaaacgtaacggtactgcgggcactttttaaaatggtgtatccaatccataaaatcaaaagtccaccgattcccataatggctaaccgaaccgcatcgttttgcacaatcagtgcgccaatcccataaaacgccacgagtgaaaagagcgcatcaaataaccagatgaacaaactgttgaaaactgcccgccgtgttgtattcgacatggcattattaaaaacgaaaatattttgcatcccgattggtgcgacaaacgcaaatcccatcaagattccttttaaaaagaacatctattaacctccttggcaagttacctttcagcgtaacatatctaggctaaactttcttgtctggatttaattgtaaaatcagcatcgtcatcaacaagaataatgctgataaaatcaacgtccgttctcctaagaatgagacacatagtccgaccatcactgcaccaatcgtaaaactgataatgatgcgtaaaatttgccagcccttatcggctgccttacgatcatgtttaaaaacagcgtcataaaaactttccgccatcgtccgtacatttccagtcatcatcaatgatgtaaatgggccaccatccaattcacgaaattcctgtaattgcgcagccgcaatgattgaaacaagtgaacttgcaacaatatccggtacatacggtgaaattcccgcaacaatcgttaagaccaagacttcaatccccaagataatccgttgtcgtttgttaatcgattcgtctttttcaaaccgatgttgtaaaatgcgcgttaagattgttcccaacataaaggcgagaatcggggtaatgtgccgtaataatacggaccatttcatctgccccaaatgggttcctaataaaattagattccccgtttgtaatccggcgaagacttccccgtgcaccaaataagtgtaagaatcaaagccccccgcagctgccagtagcccgccatataataatttgtcgctcattgtcattttgttccgcattaattcatcctactcctcaactaaactataagtattaactctatcggaaaaaccactcgccgtctacaagtagttatcatttaaaacgttatcaaaaaaaggcctcagcaaactgattttgctaaggcctttttggcttaattttctacgtcaccattgaaaccggctaattgacttgaataaattgataaacgcgtcgcataactaggatggtcattattttccttgaccacttctttaagcgtcgataattgatcggtaataatgccgtcaacgcttgtaaataacatgcgttgcatcacatcctcatcattcaccgtccaagcatatactgtctgccctttgccgtgtgcttgacccacaaaatctgagtcgagcgtcgtcacttccatcgtatagccattagccggcgtttgggggaatgtaatgttatacggcagaataaaactaacaaatagttggggtgctttttgtttaatttccgccacaatcggataacttaatgaatgaatccggttatgattcttcaaaagtcgtttttcgtatttatcgataaagtgttgcaccatctgtggactgtcttcattcgttgtcttaatttcaacgagtagtttttgatggtgcttttcggctgctgctagatattgatcaaaactagcaacctttgcagaatgaccattttcacggacagtcaatgccgttaattcagcaagtgtcatgtcatggacgccgcgatcgacacccgccaagtgttttaaattatcgtcatgcatcacgacaaattgttgatccttggtttcatgcacatccatttcaacataatctggctcttcctgcgccgttttttcaagtgctggaatcgtattttgcacaccattaccatcatctaccccgcgatgcgaaatcaaggccggttgatcgtccaacattccctctaaatagacataattgtacaatgctaccccaccagccacgataacaattaaaccgattgtgccaatttggcggagaatcgtcaaattagtccgttttttcaccttagattggcgcacagccgtcgccattgcgggaacttcaccatattggttcaatacaatctgtaagactagtaccaccgttaatgcgagtaaaatctgactgacgatttctgaaataaacagattcaaaatggctaaaaataaagcctgatgtggcaagtgttggtcgtaataccgttgactagcaaacaagattaagcggaagcccactccaacaattgctaccgacgttgttaatacaaagccttttagaaaaatacgccaagcctgatattgggtagcttgccaacagcgtttgagcgtggttcttagctgcgcctttggatgtgcaatcgtttctggtaaaaacgtgattaagcgaattgaaaggactaatgcactcgcgtagaccaagataatggggacccaaattttgggtgatgaccacatatcctgaataataaaatctggaacggtcaccttggataacaacgctgatttaaagaggacctgtccaaagggtaagattaataagaaatacagtaaaccaaccaacatcgtggttggccgtaaagcgactaatccccggactgtttccttaaaaatcatccagtatgtttcttgtgtttgcttttgaatatggcgcatactgcgcaacaagaacgtcatttgcagataaactgccgcgcaaatcaagaccagaatgattagtaagctaatcattaaaagcggatgacgcatcatcaccggcaccagattggtgtaggttaaatacgtcacgccattgagtgccaccaaccgttctacaagccacgtaaacagcggtgccaccaagctgccaataattaaattcgtaatgacgagcagtaataaataaacactccaatgttgtctaaagagccgataattagcccttaaaaatgatgttaaacggcgcatataagttcctcccgaattgttacgttaaaattggtaataatgaaatcatcagataaatcatgctactaatgagaacaatcgcgacacttgtccaaaaattacggtgcttttgaaaatgatataaggccaataaactgccccaatcgagcagttcttgacttggaaccgcaagccacgataacgtgccaaatattaaaaaactgacaacgactgccgttaacaagcgcaagaaccaaccggatacccgtagactttgtaagattgtattcacaagctgaccagtcgtaataatcaccatcatgtacaaactaatgaataatatctgacaacaaaagaaccatgctaatgtcggccagacctggttctgataaatcaaggctgcgtaatcatttattagaccgacttcaagtgatttaagcagtacctgatacattaaaagggctccaacgattggaatgccacaaaggagtacaattgcaccgatagccccacgaatattgcgccaactaggaagcccaaatgaaccttcttgtgccagccataaaccatcaaaacgcgtcaaccaccatcctagcgcaatgactaacaccaagtaataagcaaagcttagaagacgtaaccaccacggttgtgcggctaactgcgcaaagtctaggttaaataattgcaacagtggttgattcgtattcaaaagcgttaacacaaagatcaaactcgcaaggattaatccccatgtgcgcttactgagcttttgcatcatcattttgctttgcctcctttaccagagtatcaatatcaaacgatacaacccgaccaatccgcgttttagcatttaatgcataggctttggcaccagattcaaaaaccgcatataaccgattgccatccaacgtaatctactctaaatgagctggcatccgaatcttaagtagcgccttttctggcgtaaattgttggggccgcccagtcgttgcaaaaacgtaaatccatgaatcgtctaacccgtaggactgcgaaaaaaaagcccgcgtatcactaaaagttagcccttgaatcttatccactgcttgccaacgttgttcacttttaagttcattactgcggatattccgcgccgtcaatttaacaccagctttttcgcgtcctttaatgaccgctgaaacctgaaacgactggacgttactatccccgaaaatattgaaatagccgacccataatgccccatcgtgatagctaacaagtgaagcccgggtgatcgacttcaacaacgttgaatattggtattgaatcggcttttgcggctgatctgcagggtactggcgaatagttgttaacttaattgcaaatagctgtgcacgtgccttcttacggccacaaacccataagagatcatgttcaggatcataagtaattccaccaacgtgtggtcggccctttaaaataatattcttcaaatgtcggccagtccgcttatccataatggacagaattgagttgccttgccgttgatggtcataagccgaaacgatcacatagtccggcgtaactgctcccccttgaggtgtcatcatttctgctgtatatgctttgtaacctgccggcgtttttttcaacatctgcgcctggtctaaatctggcaccaagtaagttccagattgggttgcctttgcatactgtccaaaagaagccggcgttaacccttgatagtaacccaaatcccgttttagatgagggagtgtaaatcgcgcataaattacctgtctagattgcgtgattgcctgttcagtaaccgtcttagcaggaccgaaaataagccacaaagcagctgataacaaaagcaagcagccagttaataaaaaggttgttcgtttttccaaatgcatcatcttactccttatccgcaacaaaattagatacttgttgattccctcagtataccaaactctgaatttaatgtacccctttaacgaatgaacgaacaaaactattagatgcacacaaaaaaagcataaccaactaagtggttatgccttttttgtgatggctaatactttaactttccatttatctctagaatttcatcaatatggtttgcgtaccaatcttcatatgcctgaccgacaagtgctaatacctctctccctttgtcggtaaccgccaatgatacccgtcgctgatcatctggtgtcccaaattctttggttatcaaacctttccgataaagagtgttgatcttgcgtgacgttttaggagcgccaccaccaatttccttagcgagttgtcctggcgtaatcgcttgcttttcttcgattaactttaagattaaatggctgtcaaaactaacaccatattcttcaccaatttgattgagtttaaattgaatcgttttgattgcattgacccaatcaacaaatctgttaaatctttctttgctttatcttcagtcattttatattctcctactaaactctgttgccatcatttgtaaaaccaacatttactaataataaattagcttataattaagcaatattataattattattatctagttcatcgcgctattatcttttgtgcaagtcattatagtcttaatttcataaaaagtaaatattttttaaaaacttctacgacaatcaagattttcggcagtgattcatttacaatttaccaaaatccacatcaataaatacctttttatgactagagttactcagatgaccttctagatttgatttatattttgtttataaaattgattttatttcataaaaaaaggcccgcatctaggatgcgggccttcaatcattaatgtctagttatggatataagtaaatgccccggcatttgaaattgtttgggtgttaggaccagcagggttgctgaagcccatcccaccttgagtgatggtaattgtcccagctgcggcatcgtatgattgaacgtaagcaacgtgaccatatgtcccatctgcggcccaagaacctaccatttggccaccagcaaagctaacgattgcgcctgctgctggtatatggttaactgtgaagccagctgctgcggctgaagcaccccattgagcgccattcccccagttattgccagcccaaggtgctactgacttaacataccatgtacattgaccccatgcatatgaattcccagctgaattaccagcaacttttccactgccaccgaaaacagatgtgccacccttattatctgatggcgtgtcaattgatgtaggttgaggtgtgtcttttttagcattgttggcattgttggcattgttggcatcgtctgcagcctttttagcagcagcgtctgcttcttcagtacttgctttgtcgaagtctgcttgtaaagctgttaattcgtctttgttatcattgattttttgtgataaagctgtttgtttttgatcagcttcactcttcaatgattctaagtttgctttttgtttttctaaatcagtcttagtagcaactaaacttgctttagtattttcttgttctgtcttcaagccgcttaattttgccttagcgctgttaacatcatctaaagcttctttacttgcttggtttaatttattaattgtgaatgaacgcgaaactaaatctgaaaggtcatttgagtttaaaaggaagtcaacatatacgttcccgctgacagcatccccactcttttcttgtaaggtcactaattgtttcttcaatacgactgttcgtttagaaacttctttttgagcatccgtaatttgacctgaaagagattcgatttgattatttgctttagtaattgctgcttcttgatcagcaatttttgaagcgtttgttgaaatcttttgatccaacccaatcacttctatattagctgattcgatttgtttgagcaaatcgtttgttgcgttcttattagcagtaatcgcttcttgtgcttcacttgaagttgcagcagatactacgtttgttgaaagaactgaagctgttaataatccaagagcaattgtagtcgtaatcgtttttttaaatgacatggtttattttctcctattagttaagcccgaactctgagactaagtatatagggcgaatgttacattaacattacataaacattatgcttacttaacaaatcataaaatataggctttgtaagcgccttttacgactttagaagccgatttcagagaacccttccttattatttccttatcatatttaaaaagatgacgccgaattcattcagcgtcatctttttattagtcatttataaaagtcacttcttcatgctgcgtccaactatccaagcgcgcacttttcagttcaattgcgtagataatttcccgttcacgatcttctgctgataaactatccataaacccagggacttgggcgttgtaataatcagctaattcatctaacttgtactgcgcgcgataaacacgcaaccggctgctagcaatcgtcattccttcgctagttggcattgtgtgaattgccgctaaaccacgatcgagttcttcaatcttaggggtatccggtgctgtcccaaaataccaaatattcggtgcatcatccaacacgataaaccgcatttggcggcttgaaggttgcccattttcatccgaagtactgagcatcatttcatttgtttgattaacgaacttctgaaatttgcgcaaatcattttgatgaatatgcggattagcgttttgtttatcaatatacgcgattacttcatcgatcgatgtaaactgtggttttgttgaacagcatcccgtcacttttaagaatatctatgaaatgcaagtaactgctaacgtctttcttcccaaagactcgacggaaactgtttttccagcactaatcatcggtgctcccatcggtgccgttaaagaacaggcagctaacctatatgccattaagctcgctgaacaagggtttgtaaccgtttcatttgatcaatctgcttggggcgggagtaacggtgctctgcgcaacgcgattgcccctatcttatatgcggagaatttctcagcagccactgactacctaaccactctagactgtgtcgccaatgaccgtattggcttaatcgcaattggttcggccggtggtttcacgctcaacgcactcaaaatagacgcacgtattaaagcacttgcaactattaacttaaccgatatgggtgccattgttcgcgaacagcgtgatgcactaggcggtaacgcattaatcgaggaatcctcacgatcccggacattagagattgcaggtcaagcaaccacttacgcccatggagtacctgaagaactggacgaaaactcaactgatatcgaacgtgaattctacgacttttatcgtacccaacgtggcgcagccaactcgacactccatcccactcgtacaacttttactaaactattagatttctatccattgcgcgacctcgaaacgatcacagaacgtgccatgctctttgttgttggtgaagaggcatggtcacgacatttcagtgaagccgcctttgccagtgctaacgaatcaaaacagttattaaccgtaaaagcagctgggcatgtcgatttatatgatcgtatcgcgcttattcctttttcagaattaactcaatttttcaccaaaaatctataacaacgcaaaaaaataccactgacagcgaattgtcagcggtatttttatattatttatcattcaagtaggctttgactacctgataatttttgaagcccccactcaagttatacacggatttaaaaccgaggttcagaagtaaattctgagcagcattagccgtaacccctttattgcaataggtgacagttggaatatccatatctaattccgtgaaccgatcacgaatttcagcaagcggcatgttaatggcatgttcaacatgctcgtccgcatatttttgcttcgaacgtacgtccaaaatctggaagcgttcaccttcagccaagcgttgctccaattcagctggaggcaagagcggccgcccatgcaatgcattatcgagcgccattcccgtatagagcactggatccttagtggttgcatagagtggttgataagctagatcgagatggaataaatcggccaccttcgcacccaatgtgatggcagtcacgaaaacgtcaatccgcttatcaaccccatctttaccaatgatttgtacacctaataattttcccgtttgacggccagcaatggctttaatgacgttttcggttccatttaagtaatctgcatgccctggtttaatgttgtagagtacttccacatcatagtccttagctcgcgcgactgcttcagtaaacccagtctgtgcaatcgttgtatcgaacaaccgaacaatccccgttccaagaatcccgcggtgcgttaagccaccgccagtcaatgaattgccggcaattcgtcccattttattggcagtcgaacccattggtcgatacagtggtgagccatcaattacggagaaactctcaacaacatcgccgaccgcgtaaatattcggtacagtcgtcaacatttgttggtcgaccttcaacgcccctgaaggtcccttagctatcttcatatggtcgaccaactgcgtttgtggttcaacgccaagtgctagtaggaccaaatccgtttgaatggtcgtctgattactcaattctaccgccgataccacaccatcctgcgcagtcacttgttttgcggttacactctttaacacatgcaccccgttagcacgaataacttgttcagcacgataggccatatcaccatcaaaatgggtcataatttgcgcgcttcgttgaactaacgtcacgtccaagccacgtttttgaaattgttccatcatttcaagcccaacataaccggtcccaaaaatcgtcacattttgaactgaatggtgctgtaaatacgcgtcgattgcgcgtgtatctaccatgttatgcatcgtgaagacgttttggtaggcttcatcgaacggtgcaataatgcgtggcgtggcccccgtcgctaaaactaggcggtcataataatcttcaaacaactcgcccgtctcaaagtttttcaagaccagcgcttgttggttttcatcgattgaaatcacttcgatacccgtcataatgtcaacgttgaagcgttttttgaaccacgccgcatcgcgcggaattaacgtctctaggtcttcaacctcaccccctacgtaataaggcatgccacaaaccgaataagaaatatcctgacctttttcataaacgacaatctcatcaacttcactatttcgccgcgcctttgctgccacactcgtccccgctgcaacggagccaatcacaacaatcttcatgatcatcaccaatccttattatatttaaagacaatataactcattttaatcttgaatgaaatccatttgttttcgactcccaaattgcaagaacaaattagccacacgataaatcctattaaatcagtattttcattaatattcatattttatggacttaacttaaccggcggaagcagcggagaaaagctctttgggtgtttgatagccagtttgccggtgcggtaaattgtttagctttgactcaactgcttggatatcatgaggacccaaaatatccatggatagacccttgggtacatcgcggcggatcattcgattatgcgcttcgttagtcccgcgctcagaggaacgatatggatgggcataataaaggtcagcgacaccggtaagtacagcgccaacttccgagaactcagcgccattatcggcagtaactgacttcatgattgatccgtattcttgacagatcttggccagctcatagttgactgaatcggcatcacgaccatctggatgtaagctgattcctgagaaaacttttaagagagggtataatgaataaatcatctctcaaaaggaaggaatttttacatgccaactcgttacgacaaagaattcaaacaaaacattatcaacctatataagcaaggcgaatcagctgcccaactggccagagaatatggcattggctattcaacagttcataagtggatccaaggccaggccaaaactcaatccggtaaatcgccagacgaaatcaaagcgatggaaaagcgactggcttcgctgtctgaggagaacgaaatcctaaaaaaagccctgggcttccttgcgcagaagtaaccaatatctttgattacattcaccaagaaagccatcaccaccaggtaaccaagatgtgccgaatcctccgagtttcaaaggtcgatgacagtgggctcgattagcttcgtacttagcttgtgctgtttctggtgagtatacagcgtaatattggcgttgaccattcactttttttacttggtcgatctcgccgcggcacaattcattattgattgtttgatgacaaacattaagcgctctggcaattgcacgattggaatagccttggctgtgcagcgtagcaattctgcctcgttcaaacgaagttaggtgctgaccttttttctgactgtggtattctgttcttgcatcaagacaataacctctttcattgtttgtgtaggaacatcaatgataacagagattcgtcttggtgttttttattttatcaattagctaaaagtatttggctaacttgattataaaacgcgcgatttttatttggaggttcttattatgtttaatggtctattcaaagatctaacaccaaggtcgtttactggtactgcgtcgagttattattagtatcgtgggtctctgtgtcttttcagctttctttattatctttggtgctaaagtaacttttgaaattcttgcaatatttgctcgagatacgactacatttgtcactgtgttgctttacttgctttcattatttatttttttaatcgggttcaaaaccaagattactcaaattagtgttgttacagcctggattagtgaagtacagtttttatttttgttattctcgccaatttggcaaattcacgctggaagagaagttgcgttctatgttattttggctatgaggattctggtcacagtattactggcatttcttttgtatctatatcatcgcaacaataaagcaaatcgaaaataccgtcgataacttaatacaaaaaaataggctagcccttgagggactagcctatttgaatatcatcaataaaaatcgcgttcaaattgcattaaatcattgattaaagacgctgcttgcttcaattcagcatctttatatttttcggtcaccttatcaataacttgcgctttcagcgtttcatgcattttatcgtggctttgcgcaatcacacggcctttagcggtcaaagaataatagatttttttctgatcatctggttttttagtcgcttgaattaagcccatttgaatcaacttcttagcggcgcgtgtaatgccgccacgcgtaaccgccaaccgatccgctagtgctacacctgttaattcttcggcctctaatcctgataatatgtgcaatgcaatgattgatagctgcggaatcatcgttttcaagttctcatcactcagctgattttgcaaccatttttgttcttgaacaccgcggccgttgacactatctgagcgtaattgcttgattgcatgatagagtgccatcactgattcgttttccatttgcttaacctctcatcaattgttaccaccagtatacaccaaattagaatactttagctttggtcgtcgcttccgttagggcccgtgctaatatttgttcacgttgatctgcatgagcatccgcgccttcaatatagacgtgttcaacttgattaacaccatagaatttcaacatattggttaaatacatatcgcctaaatccataagtgcagaactttcgttactcctaatcttaaataaacggcggaacaagaacttaacgatcccccacttgcccccagcgtgataaacactgccagctgcttggatatggattgctttcttaccttctaacaaacctactgaaccgttcggtgtgtatttgaatgttttgtgggcgaccgccgtcaaatctaaatattgtttcatctcagctggtaaaaaatgattgtacattggattgatgaagacatatttatcagcttcgataaattcatctaaccaatctgcgtgttgttgtaatagtgttttctcagcttcagccattggttcgtcaaatttttgtttacgccatgcagccattgtcatatcgttcaatggtggaacacctgcttcagtatatagatctcgaataataatttgatcatcaggatgggtccgacgataagtttctacaaagcgggtccctaccgctagggataaactcttttcaacatggggatgtgcttggattactaataatgtactcatttaaaaaaaccttctttagtttcgtttagttgcttgtcaacaaaataaagattaccatcgttttagttgcttgtcaacaaaatgttttaaattaccgttagctatcaaatttagctgaagtgccctagtagcgccctaacgtgtcatttttaagcaaaaaaaataggctatcccttgagggactagcctatttgtgtaagcttattaaacatgctttttaaagctgactcctgcgcttagctacaatccgcaaacaatcgactaacgtcgattattcacgaatttaggctaatgctcagaatcaacccgctttaaacacactctttaataattagtttaatttcttcttgcttacaacattcaagttttcgtctaaatcataaacaactggttcgcctgttgccatttcaacgtccatgatgtcttcatcagagatgttttcgatgtattttgttaaggcgcgtagtgagttaccgtgagcggctacaatgatattttggccgtcgattaattttggagcgatttcgtcttcccagaatgggataacacgttccaaagtaaccttcaagttttcgccaccaggaattgcttttggatctaagtgtgcgtaacgacggtcgtttgctgctgaaccttcatcacttgcatccaatagtggaggaagtgtgtcgtatgaacgacgccagatgtgaacttgttcgtcgccccatttttcagctgcttcagctttgttttggccttgtaatgcaccataatgacgttcgtttaagcgccatgatttcatttctggaacccataattgatctgaaccttcaagtgcatagtgtaatgtcttgatggcacgagtcaatactgatgtgtaagcttggtcaaaaaggatgccttcttttttcaataaagcaccagcgttttgagcttggcgtacgccttcttcgcttaagttaacatcaacccaaccagtgaattggtttgataagttccattcactttgtccgtgacgaataaaaactaatttagccatgtgtaagtaacctcactttttttatttttactctgttcattttacactgtttgctacacaatttacagtcttatcttttcagaaaataatgaaccttctttttttatgctcgatcagtcgttttcgtttctttcaataagaaaagcgccgccaagatggcaatcaccatgagcactagcgacgtcgttacaacagcgatcatccctttatcaaaagccgtgacaacaatttgttggacctttgcggcatacggtgtcttcactaattgttgcccccacgcgattgcatgtcctgaaaaagcacctgcttcaaccaatgcttgctgaatgccagttgctgccgccttcgggattgagctgccactaaagctagtcttcaaactcgtttcgtaggcattcgtttgtgataaaccgagaatcacaacaccgacggtaattccaatttggcggaaaacattcaataaaccggatgccattccgatttcttgaggattaatattatccatcgccgctgtattgatcattggattgataatcgcattgcctaacccagttagcgcaagcaatggtaagagttgcatataagtaaaatcagtcgttgtcacttgtctaaaaattaataaaccaagggcagaaacagtaaatccaaaagcaatcaaccattttttaccgaatttatagcctagaacacccgtgaatggtcctaaaacaagggaccataaactcattggcagttgatgcacaccggttgaaaaggctgagtaacccatgtaattttgcatcaaactcgtttgataagcggctaaggcaaaaatgccagcgcctaatgagaaagctaaaatcacaacacccacgaaatggcgattcgtaagtaacgtcaagttcatcattggtgcttttgctttcaattccacaaagacgaaaagcgctaaaattaaaacggaagcaactaaccaccccataatgcgcatatctgtccaatcccagtgcatatgttgttctttttgaatcaacccataaatcccggagaataaaccaattgctgacaagatcatccccataaaatcgattgattcgcccgcgccataagctggtgtttctttaacattgcgaatcactaagtaaactgaaataatcccgactggtaaattgacgaaaaagatggatggccagccgaagttttcgactaaaaagccccctactaagggtccaatagcagttgaaaaaccaatcacggagcctaaaatccccagtgcagtcccccgttcacgcccttcaaagttcgacgccactagtgccatcgataaactcatcatacccgagccaccaatcgcttggaccgcgcgcccgatatctaataccaataaatttggtgccagtccattaacgacagaggccgctgtgaataaaatcatactcatgataaaaattttcttgcgcccgaacatgtcccctaatttggaaacaatcaacaagctgaccgcatacatcaacgtataagcgttcaaaacccattgtaagttgctaaaagttgttttaaaatcaatcgccatacttggtaaagcgacattgacgacagttacgtctagcaatcccataaagacacccagactcatcgcgaccagcgctatccagcggttggttgtttttttcattttactatctccattttctctatctcatttatttgtgcttgtagccaatccattttggctttgatcgttgtgattacgaaatcggttgaacgaatctgccaataataataatccgtcattgtctcatccgcatcttttaattcagttagatgtttttccacaccgctataaacatgtaaatcttcagccaactcactgtagaaatcttgtaaaatgctgacttgttctgctgcatcaatgtagtgcatcccccgcatcttaaaacgataagcatcatcccacttcgcatcatgaacgactggtttagccattaattcagcaaaatagcgccgtccctcttcagtaatgtgcgcaatcttcgtaccacgtgaatcctgatcagcttcctcaaacccaatgcagcctttgctttccaatttatctaacaacggatacaaaaccccatttgaaattttccgtctgggcaccatcgcattttccaagataatccgcaacttatagcccgacatattccggctcattaaggcggataacatcagcaattcatacataaacgcataacctctctctttaatcagtcttttagacaggtctttaagacttattaagtctagttctttccgacatatttacaagcctttttttcatttttagacaaataaaaaaacatgatccgcataagttgcctgataacaaggcttcatgcggatcacgcttttatggatttagggatgtataggttgtacactctctctttcaactaattcaattgaaagtactttttgttgtggcgcaatagcaggctccacaatccggttcaataatagacgtgttgcttcttgcccaagctcgaaaatcggttgcttaatggtcgtcaattttggtgtgacatattcacaccaatcgatgttatcatagccaatcactgagatatcttctggcacctgtactcgtaattcacgtaacccacgaatcaatccgatagcgagttcatcattgattgcaaatacagcagttaccccgctatcaatcacctgtcgtgcaacttggtaaccacctaatttcgttaacggtgtcgttatttgccactcatccgccactggtaattgggctttcaacatcgcggcttgataaccaatgaatcgttgttcgatgttccaagctcgttgttctggtaaaacaattccgactttatgatggcctcgttcaatgagataccgtgcggccaactctccaccttgcgtatcggcaaccgtaatttcatctcctgcatgttgtttatctgattgatctaataagataaacggaatttgtcgtttttgcagatagctatccaacgttgttttttgtaaatgagggacagccaaaataaagccgtcaacatttcgacgaaccaattcctttaaataatgatcaactttctgattatgcgcccctgcactataaattaatgggatgaaatcgaattgataggcaatttcttcgacaccttgaataaactgactaaaaaaaggattattgatatccggcaccaataccgcgatcgtcttcgtttctttattaatcatattttgcgcgaaataatcaggttcatactgaagtctttcccgagcggctttgacccgcgcaatcgtttctgcgctaaagcgctcacctttattattaagaattaacgaaactgttgtgaccgatgtttgcgccagcgcggcaacatctttaatcgttacttttcgaaccattttggcactcccccgaatcaaattaataaaaacgcccacagccggctagccatggacgctgttaatatgattataactgaatatccttttcataaggaatcgaattttgcgcccctttagtttggactgcaatcgaagaagccttattggcataagtcattgctgcttcaatgttactgtaatccaattcaagtttcgtacttaaagcaccgataaaggtatcaccagcagcggttgtatcgactgcttgaactttaaatgccggtacaaacccggttgttgttggtgttgcatagaatgagccctttgccccaaccgtaatgataacgactttaatccccatcttaaacatcgcttccacgttagctttcattgatgcttcgtcagtcactttaatccctgtgataatttcagcttccgtttcattagggacaatcatgtccgtcactgccaataattcagctggaatatttttaatcgctggtgcagggttcaaaatcgtttgaacgccgtttgcacgggcaattttgaaagcttcaataattgcaggaataggtacttcgaattgagcgacaattctgtcagcatctttgatggcttcttcggcttcatgaatatcatcgactgtcacatcttggttggccccaccatagattaaaatactattttgtccactagcatccaccatgatgtaagcttggccagtcccagctgtttcagaacaacgaacgtgatcaatgttcatgccatcttttttgaacgtatctagcatgaaatcagcggcgccttccttaccaaccttactaatgaaagctgtttgcgcacctgaccgaacagctgcgattgcttggtttgcacccttaccaccaccagcaactgcgcggccatccattgctaatgtttcacctggttgtggaaaacgctgaacgtttaaaattgtgtcgacatttgttgaccctaatacgattacttttttcatttgaaagccctcctaatggttaaaatacaacgccactttctaaaataatgttggaataaggtgtcatttcacccgtccgaacaaatgctttggcctgccccaagtcctgtttcatttgtgcgtgatcaataaattcaatgggcgtctcaccaatcacttttttgatttgttcaagttgtgctggattagctgttttaatttcgtttgctaagtaaactttttgaatttccaattctgttagaacatttttaagtacttgaataaaacttggtacaccattttcgatggccacatcgattttttgcgttccagctgggaccggcatcccagcatcgccaatactcattgtatcaaaatgccccatgtttgaaatcacatttgaaatttgtgaattgataacttgtgtttttcgcataataaatccgccccactttttatttgataaaggctgtcacagatccagccactaatacgagtactaaaccaattaatacggcaaccatttcttttttggtcttttgttctttcaacacataaatcccaccgattgtggcgaaaatgacactggtttgggataaaacaaaccccgttgctaagccattcacagaaggttgtgctgagataagatacgtcagcgctgcaaacgcgaagaagaacccactgaagatattcttatacgaagttgcttctttgaaaggttgataagtcttgctggtttgggttaatccgaagataacacctacaattgccattcctaatgcttgtggcaaaaagccttggaaaccgtccgcgtgtactgcttgtggaaaggcggagtaccctaggtagcctagttcgccaactaataataacaagatgccacgcaccgcgccatttttactagcgcttgaacgatcttcactccaggctgttaaataaacaccaaggataattagaataatcgctgtgaacccaatcaacttcgattgtgtacttgcccagttacccaagatgaagacgccccacaaagatgccccaacaagttggaacccagttgtgattggcatcgttctagaaacacccatggtttcaaaaacatgaaaggtgataatctgcgctaatgcccaacaagcccctgaaattaaacaaaaaataaatgttttggtttctggaatcggtgtcccgcggaaaatagccacaataatggccagaattaatgtcccaagtgtcgttccaataatttgactcgctggtttcccaccaattttaccaacgatcacagggaacaatccccaaccaatcatcggcattaatccaattaagatattgacagcattcatattcaatcctccgtcctttattctaggctagtaaaacgttttactaactatcatggtgattattataaaggagcttctttgagaattcaactcttttttgtaaccgctttattaaagaacacaaaaaagattaatctggcgcgcatttggcctgattaatctttttttaatttattttttctttgcttgtccgtatcctcgtttagatttataacctgcatctaaaatttgacacatttcaacataatgtcgttgctgtgtttcttcagctttagcgccgtaaacataacgtgcccattcgcgttgatagcctggtgttagtgcgtcgaaaaaggtttttgtggctggtgtatcttctaatcgagcactcaatcggggaatctcaacttcatattctgatagtggtttttgtggcatggtgcataactcccttattttaaccgcataacatctctggcaatcatcaactcttcattagttggcacaatcaggaccttaacgcgtgattgatcactgctgataatgcgttcttggctgcggacattatttttatcttcatccaattctacaccaaaacaagcgagttgttcacaaatggcagcccgtaattcactgccgttctcaccactaccggcagtaaagaccagcgtatctactccattcattaaagctacgtaagaaccgacatacttcacaactcgattgacaaaaatatcaagcgccaattgggattgtggtcgtgagtcagcggtttcttctaaatcacgcatatccggtgatagttcagaaatccctaataagccagacttatggttcaaaattgtgatcatctctggcattgtcttacctaatttttcagctaaaaaggctactaatgagacatcaatatcaccagatcgcgtgcccatcgtaatccccgcaagtggtgtgaaccccattgatgtatcgacagcgtgcccgtcttgaatcgcggtaattgatgcaccactgcccaagtgcaacgtgatcattttttgcgtttcaagcggctgatctagcatttcagccgctcgatgagcaacaaaccgatgactggtcccatgcgcaccgtatttacgggccccatacttttcataatacgcttgcggaatactgtataaatagttttcggcaggtaacgtactgtaaaatgacgtgtcaaaaacagccacttccggtacgcctggcaataatgcagtgaaaattttaatgtaataagcttgggttggattatgcaatggtgcatattcagccaaacgattaatctcatcaagcccgaccggattaattactgcagagtccttgaaggcttctccaccagcaaccacccggtgaccaacccccgtaatctcatcgagatgggttacgatatttaattccttcaaccgcgttaataacaacgttgctgcttgttcgtgcgtcgtaatatcttggacttgtttaaacttttcctgattgccatacttcactgtgaatacagaatcagataagcctaaccggtcaatcattcctttagcgattactcgttcagacggcatttcaaataattgccacttcagtgttgaactacctgcattaatagccagaattttttccatgatatcgactcccactctttcataatccgttcatggcttaattgtaagcaatttcataaaaagaaacaagccctattatatcagagtgcgtcatcaacgggtaacttctgagcatttatctaacttagcgaattggcgatgcaatcgccgatttgataagtgtagcaaagcacaggaagttattgatgaaagcacgtttaaggcaagaatgcatttggttgcggtcagcaactgagcattaatacaaactagcgcttaatctcgattttaagattaagtgctagtttagattaagcggaagttgttgcaaccaaaaagcacgttttatccataaaaaaagaaccgcccccacgcggttcttcctatttcataataactattctgcactttcttcgttcattttctttactttatttaggaatgaacggcccatcttgttatcttggtattcacttggttcaatgacatctaaatagaattgatcaatgaatcgaatcaaaccatcgactttatcacggcccatttgtgcttcgatttcacggtatttttcaacatagcggctcaccaaccggtctaaaacgtcttgaccttgtttagttaagctcaaaaatttaacccgttgatctgtttgaagatgttcttcaaccacgtacccattttctttcagtaaccgacattggcgtgaaattgctgaacgactaacactcatcgtcttagctaacttactacctgttaagttttcgttagttgaaatttcgtacataattaaaaattggtcaaaagaaactttgtaatttaaactttctccactgacaaagtcgcttaaattgctgacaatccaccgataaatcaatgaaagatgcgttactacttcccaatcatcagaatacttgcttgttgcttttgctgtcataaccttttctccctttactaaccgatctgtcatgcgtagaaacaattaacggatttaatttattttgctatcaatatattagcatattttgagagaaaagaaaccactcgattcattaaatagctataaatagatttgatgtgcaacaattcaattgaccatataatcatcaacccactatattagtttgtcgtgactatataaaaagaagtcattaaagataaaattattttcatccttaataacttcttttaataacatcttataggttacgatccatattgaacgtcaatttcgataaattaatgcccgacataacgagttccccaatcatcgaggtcgcttcagtcgccatctgcttaacaatcgcatggttttgctcagtcaaatactccgttaaggcagcgccttgatacttttgtgcttccacttgaatggcttcaatcatcgttcgcaattcttgcttacaacggtttaagtaatctacattgccttgaatgtactggctataatggccttccaccaatactgaaattgtccggtataaccaatatgcactcttcatatcccatttcattggtgtttcgctgaaacttagatccgtatcgttcgcattcgtgaaaaatggaatgaacggtgtatacgttggcatccccattgtgatccacatgatggccgcttgttcctttggcacatcattccgtaattgtaaaatatgtgcattttgcgtccgattcaaaccgattgggcggtaacgatacttgtcggcatcagtcccatgccccattggatcgaatggcgtttcattataatgtgagcctaacaacatttcaatatcttcaacactaattttatgttcaatacgccgaataaatggtaattcagccgattcgggtgacatatcaaaatcagcatcaaataaatgatgggcgtaccaaacccgtggtgtattatagtgccggtctttttcattcatcgtgccaaaaatgtggcggaaattccagcccgttttatccggattcaaatgatgggcttcaacgtattcttgaatgccttctgcccacataaaattgtcggcatccgtgaaatcaacttgttgaatcgccacttggttggcggcaactgcataagcatcatctggaatccgttgtgctagccataaatgccctgtcacaatttccatataccacacttcattgtgatcactaaagagcacactattgccggcgggtgagccgtattgtttaatcaaattaccgagatagctgaccccttcgcgcgccgagttaatgtacggcgcaaccatagcttgcatgcaatcttcatccaacccgtctttcaccaatggatcataagcgagggctttttcatttccatatgtactttcggtacagctcatcgccacgttaacttcgttaatactactttcatcataataaccattatgtttgtaatcaacattcggaacagcgggccatcggtagccattctcaggtaattcggcttcaaacccgtttaaccaagatttaattttagcacccttacgccctttaacagctggattgatgtgaaaccgttgtggtgttaaaggtaaaaaagtatcgtcgttacgcgcaatcatcgttgatccgtccaatgatgcgtttttaccaactaaaattgatgtacatgctgattccataagttgcactccctctgatgaccactttaattgaactcatcggtcacgtttgattaaaattttctcataattaatatccatagtgtacgcttctcacttgcgaaagtatagcctgatttgttgattaatttcctttaacccccgcatttattgcgatttctatacaatattggatttcacgttaatttccgatttcggaattatcgtcaaacgaccatgttagcgctcctaatttcatgatatattattagatgaataactaacaacaaggtggtttctcaatgaaaaaattaacacttgctctgttgctgaccatgaccagctgtttcatgattctagctggctgtcagaataaaacagaaattccagctgccgcaactaaaacagaagaaaaaattgatcaatacgtccaaaaagtgaaccaactctatagtgatggttcccgtaaagatcctgcgaagttaacagccaataaacaacaccaaattatcactgcggctgacaaactcgacaaacaaatcacgcccaacctttatatgagcggaattagcgctgatgcaaaggctgattacaaggctgcccaaaaagatctagataagattactggtaagcaaccagcaactagtgaatctgaaagtgttgcttctgaaaagcctgctaaaaagaagaaaaagaacaaagttaaaacaagcgcctttttcgataaagatgggattgtcaaagccgatgcacaacttggtgaagaaacggactataccgaccaccccaaacaacttgctgattatcaagaagctaaaaatcaattagcggctatggcagctgtccggaacttatttacagacgacaacctcaagcatattccagctaacctatctgctagcgacttcccttatgtccgagctttgattaataaatcaacccatgacggctttaaagaaaagtacttggcgtatgttaagaacgctgaaaatcaatacaacacttactctaacaatacccaagcggcaaccacgcaaaacacaacaaccgctaatcaagcaacaactaaccaaaacacagctaccaatacacaaactacgacaggctatgctgctaacacggcaacggggaatggcactggtgcaacaactggaactgggacggggacttcgacaacggataccacaaccggaaccgggacgactggtacacaaagtaatactcagaccggtacagatcagacacaaaccggtacactccaataatcttaagacacttcctaaaaagtacgctatcttcttgatatgcgtacttttttgacgttcgcttacgtttagtcttttaatcgccgatatcttaagaaacatgtaacagcgctctaactattatgtaacatgtttgttactttcagatgctatgctaatcagcgtactaaattaattcaaaattcaaacaacttaaaaaaatttttcgaaggagcacaacaaacacatgaaaaaacaaaaaatgacttacttatcttctggaatggttggccttgccggcttagtattgatgggtcttcaaacaaatgatgcccaagctgcaacaaatggtacggttaactacgctgacggggcaacaaccgtttggactagcccagcagtaggtcaaaaacctgctcgttacttggcaactaaccaacaagtaacaatccaagacacaaaacaagtttacggccaaacatggtacaaacttggtaatgacgaatgggtttcaagccaattcattacagccggcgatgcaactgctcaaccagctgcaacaacaaccgctgttaagaacacagtaacagctaacttccaatcaggtgcaacaactgtttgggctgacacaactgctgctcaaccaactggcgaatacttaacatatggcacaactaaaaacgtcattgatcaaaaagatttaaacggcacaacttggtaccaattagaaagcaaaggttgggttcctgctagctacgttgttttaaacaaccctaacttgaatggcgtcacaccaattacaaatgcacctgcagtgacaccagttgttgcaacaaccactacaactgaagttcaagcaccagctgctcctcaagcaacaacgccggcacctgctacagaaacaccagcgcctgctgcaacaactgaagcaacaaccccggctgctacaacaagtacaccagcagcaacaacacaacctgctcaaacacaaacaacgacaactcaaagcagccaacaaacaactcaagctacaacaactcaacaagcaccacaaacgaatacaacgacaaaagcaagtggtaacgcacaaactgttatcaacgctgctttatcacaaatcggtacaccttacgtatggggaggctcaacacctggtgttggtcttgactgttctggtttagtgcaatacgcatacgcacaagctggcgtttcattgggtcgtgtcacaactgctcaagaacgtgctggccaacgcgtctcacttgataacttacaacctggcgatatcctcttctggggtggcgctggtgcttcataccacgacgcaatctacatcggtggtggcaaatacgtccacgcaccacaacctggcgaatcagttaagacagcaagtatctcaagctacttcatgccttcattcgcagttcgcgtcctttaatcaaaaatatgtatttaaaaagagccacatcttaggatgtagctctttttttgtggttaaacttagtttaaaatatatttattttccatattaaaagaccatccaaaggctgcttttcaagcgacttttagatggtcttttaacattattttgaaaaaaattcattataattatttagctgatttacgttccttcaagaagttcaatacagcagctgtttcagcgttacgttttttagcattgttttggttaacaggacgacggttaccagaaacactaacatgtaagttttgtgacattgcgcgtttcctcctttcgtgcatatattctattattctaatctgaattgacttatttttcaagttaactttattcgtcttttggttttctgaaatagtttaggagccaactggtcagcggaacggttgctatgaccccaatcactccgattaatagtgcgagtccctcaccaattaaaattttatggttcacaattttactaattggataaccgagttgaatgaaccacatcgttaatgacaagaagctaccgaaaaaactaaagaacagtgtgttaaaagccgtcgcaataattttttcaccgatcgcaatccccgctttaaagagttgcttggagcccatttgcgcgtcgtattctaagatttcgactaaaccactggcaactgcaatactcgtttcggcgattgcccctaagctgcccagaatgatcatcatgatactaattttttggaacgacaagccgattgcgagtccaaagccttcaatctcttctgcatcttccgcaccaaagccgtaggtagctgctaactggctgaggggcacaataatgatcagcaagcccaccaccacgattaacgacgtcacaaacgccgtcttggccgttaatggctgcttggtattcatgaagatggatgtcgctaacaaaatcagactcaacagaccactcacaatcagcggttcaaacccacccgccaccaagaccagtgccaatataatcacgacaaaattcaaaccaaggctgaagaaaatcgtcagcccttgccaaccacaaaccagcactaataagatcagtaaaattcccgttagcaacatcataggcgtctcacccgcactaactggcttgccaacaagctcgttactggcaccgccaaagtaatcccaatcgcactaatcaccgtctgcgtaaaacttaacgtgacagttcgcgataaggtatacgcaattgtgttgccattgcgtagatacaataaaataattggaaaagcatccgccatgactaaaaagaacaacacattaactaacggaccaataatttcgcgaccaattgcgagtcctgatttaaacaattcagtcttcgtaacgtttggccgttcaatcgctaattgctggagtgacgatgaaatatcggtcgtctcatccatcacagcgcctaaaatcccgagcacgacttccgctaagaagaccgttttatacggctgtaattcataggccatcgtttcataatgcaagccttgatcgccggttaatttcaagacggccatgctgagaaacagtgctaggaacgttgcgccaattgtcgcgccatatgagacaagcatctggcggttgagtcctaatactaaaagtagcgttaaacccgttagaacgaccgctaagccacacataatcggcaataaccaccgtccacccgtcatcgcgtttaaatggagtgttaagacgaatgcgacgagattgaccaagacactgattagcgtcatcaatccgcgcttgagcatcattagtaataggaaactaaacgtcaacagtgttaagccaacgatgattgtatcgcgcttaggctcgtttaaggtccactttttcaaatattgatcacggtgtaaaaagacttgttgtcctttatagtaccgcgtcgacatcgcttgcgacgccgtatacgtattgcgtagcgtaatcacttgccctttttgcttagtgttcaaaaattggcccgtgacccgctggactacttctgtatcttcattttggtactcatcagtctgtttctcacggctaattgtctggacccgcgttacccgaataatcggttgctgatacaaaccagcatcgaaatacgtccctaatacaccgaggacgcagatgacacttcctattagaccaatccacagccgtttatgttttaccacagtcgtcacctctgttttattctagcgtttctgcgggtgaacgtcagctttttgaggctgatttaatcattatttaagcgactattgaaaatcccatacgtaaagtagaccactaagccgatgacaaaccagattgccgctgcaatccaagtgacttttggcaattcaaacatcatcaataaacatagcgctcctgatattaacggtaaaactgggtaaaatgggactttaaacccatttttattcggaatgtccttgcgcttccgcaatgggatgaccccaatcgacatccagaaaaaagccaccaatgtgccgatgtttaccaaattagtcaattgatccagtgaaacgaacccgcctagaatcatgatgactaccgtcacaattttgatactgttagttggggtttgatgttttgcagtcactttaccaagtgcttttggtaataagccatcacgaccaattgaatagatgaggcgggaactgctgtaagtcatcgtcaacatcatcgtgaacatccctgctaatgcgccgagtgaaatcagaccggcaaaccaattttgatggacgacttgtagcgcgaatgtgaccggattagcaacgtccaattcgcggtacgacaccatccctgtgaggacaaacgccactaatatataaagcaacgtacagatgattaacgtcccaataatcccgataggaagatttttttgtggattcttaacctctgccgccgatgctgacacacagtcaaagccaaggtaagcaaagaagacgagtgatgcccctttgaaaatcccacttaccccaaacggcatgaacggttgccagttagtgggtttcacgtagaaaatcccgacactaatgaaaagtagcactacgcctaatttaatcaaaaccatgatgttattaattcgtgttgatgaacgagtccctcgcattaataatgtcgcaatcaagcccactaccagcatcgcaaacaggttcacataagtgccatgtgccggatcaaacgggccagtaattgcatgcggaatatggatgccaaacccttcgataaatgatacaaaataagccgaccaaccagttgaaactgccgcaactgacaacatatactccaagaataaagcccagccaagcagccaaccgattaactcaccaaaaataatattgccatatgagtaagcacttcccgcaactggtaatgccgatgaaaattcggcgtaacacatcgccgcaacggcacaaacggccgccgcaatcataaatgaaatcgtgattgccgggccactatgtaacgccgcaatcgttcccggtaagataaaaatcccggtcccaatcactgcccccacgcccaatgcaattaaatccttagccgttaatgttttggccaaccgctgatcttgttgtaaataacgttccagtgattcttttcgtaacatctttgccattaatcccattttaaccactcctatttttattgtatgcactcgactaggcgattactcgccgcctaccaggcttcgtcgcactcatttaataacaaaaaaaggagcccactagtcttcactagtgagccccaccaggaagatgactcggggttacccagccatcttccaattcattaaggtttgtcatttcaactcaaatgccttctccttaatcaaccagtcgattactgggtatcttaaagaaaaagctaaaggcaacacgttgcattgaattcatgacagaccctccttgttattaattagttacttagtataggggataaccatctatttgtaaaggattattttaaaagttgtttttctaaaaataatctgctagaatcaaatttaacttattcaaaggatgtgactggcattgaaaatcgcatgctaattttctgacaactcgattggtacgaactgttcatgcacgtgcgtggaccgtttatttccgattgccgttagagattgcttgcgttaattttcaggtcagttacctaaagacttgttaaaagacgctgttattgcgtctttttttgtgcatttttaacgacaactgggccaatctcattcaatcaatgaggtgataattcatgggcacaattcaattcaaagcactcacatttaactattcagatcaaacacaaccgttgttcgatcacgtcacgcttcaattcgacgccagttggaaactcggtttaatcgggcgcaatggtcgcggtaaaacaacgttattaaaattacttcaacaccaactaccatttgatggccagttggttaccaatctcgattttcaatatttcccacagactgttacagaacctacgcaactcacacacgatattctaatgcagctaggtaacctcgacaattcaaccttctggcaagtcgagcgggaactgcggctcctacaagtcgcacccgaaatcgtctggcaaccatttgcttcgttaagtcctggtgaacaaaccaaaatgttactcgccttactattcatcgacgactatcattttcaactgatcgacgaaccaaccaatcacctggatcaagaaggccgccaagtcgttgccaattatttacgccaaaaagccggcttcattgtcgtcagccatgaccgccatttcttaaaccaagtgatcgaccatgtcctagcgattaatcgtgccgacatcaccgttcaccaaggcaactaccaaacttggcaaaccgcccacgaccaacaagctgcttatgagcaacaacagaatcaacaactcaagggcgatatcaaacggctgacaaaaacagcacaacaaaaagcgcagtggtcccacgaagctgaaaaagggaaaaacgccgccagtgtcaaaactgaaagtgccaatctcgataaaggcttcatcagtcatcgcgccgctaaggttatgaaacgggcgacgacaattgccaaccgcgcggaagaagcaatcgaagcaaaacaacaactttttaaaaacgttgaaattgctgcaccactgaccatcaatcagcgacccctcaaacccggtcaaaatgtgcttagtgttgatgaacttgtcttacaacaagacggcgtcatccttaatcaaccactctcattcaccttagaaactggtcaacaggttgccctaactgggattaatggcgcaggtaaatcaacactgattaaggcgttacttgcattacccgcaactgaccacattgccagcggtagtctgcaccttaatccgcacttaaccctctcgtatcttccacaagatttcgatcaactgagcggctcactggccgacttcgctgctgcgaaacaggttgatcacgaacaactgctaagcatgttacgcaaactgggttttgaccgcgatttatttacccaccgtctagaaacgatgagcatgggacaaaaacgtaaagctgcactggcacgttcgctctgtgaagaggctgactgttacctctgggatgaaccgttgaattacctcgacgtcatcacgcgtgaacaagttcaaactctaattgccgagcaacgcccaaccctcctatttatcgagcatgatgttgatttcgttaacgccatcgccacccaaacctacgcacttcgaccacaacactaatccgtattatttgtataccgtgtcacgttatatccgcgcacgttgaagtaagtcgttggcgactcatcatcaaaaaaggccgggttcatatcattaagtcgcgtttcggtattggttaacgtttgttccggcagtgctaaattttcacggagccgattcgaagcagcctgcaaatcttctgtactaatgatttgataggtactgccgttaagccacgccgttttacctagcaattggctgctgacaatttcaccactactttgatgatagttgcgaatcaactgcttcacttggtcggctgtaaaatcagtgctaattttctgaccaagcttagtcattaagtcaccaatgttcatcaaatattttggcttttgaattttttgcgcaacctgtttcaaaacttcttgttgccgcaattgccgcccatagtccccgcgcggatcttgataacgcatccgactataagcaagcgcctgatcaccattgagatgatggtggccttgtggaatcacttgtccattcaaattaacgtcgatcaccgtatcgatggtaatccccccgacaaaatcaaccaattctttgagtgcgcccatatcgaccgtcaccgagtagtcaatcgggagccctaaaaactgactgactgtttttttcgccatcttagccttgccaatttcataagccgcattaattttctgaatattaccgccgtggtcatctgccatctctgccaatgaatcacgcggaatcgagtagaccaccgttgcttcttacgccgggttaagtgcaaccatcatcgaatccgacagaccacgatcaacgcgcccatccgcgcctgtgtcaacgcctaataataggaacgagattggctttcgctgatcaatttgttttgaaattcgactagacccggttttaatcgcatcaacagctttatcctcttgatgcaaataaaaacctagcgccgccagactaatcacaacaatactactgattacaatcacgatactgatctttttcacagtcaattcccctttgtttaaacgcccaccgcatccttttttagatatgaaccaataaatgctgtcccccttttgaatcgttcgattctggcggacagcattttattttaacctttgctttaaccgacgtaagccaactagcatgaccggcgctaagtgcgaccgattaagccatcgtagccaccgggatgtgccggttggtaaaccacgttctaaattgatcaattgcgtctgaatgaattgtcgctcaggaacagtcagtgtgcgctgatcaaaaacaattaacattctaaaaaaggtccgcacatactgctttaaaaatcgtgtgtaagctgcgcgatccacttctgcaattccagccactaattgcgtctcaatgatgtgcagagctgctaagttaactgagaaccactgcggctttagggtactcgtagccgcctcagcatgccctatctcgtaaacatataaaaacgctgcccgatgcctaacaactcggcaatgttgcaaatactgcaagttgaaaattaaatcctcaccgatacgcagcgattcatcgaaccgcaatgcttcagcttcaataatcgctcttcgatacaatttattacatgattgaaagaagacattttgataatagtagtctaaaaaagcccttttgccgtcttgtattgatagtcaccatcttcagtcaaaccaaaagcagaatccgttccgccggctctttcgattttagttctgaatagcacccaatctaccgactgaccgacgactggttcaaataattgggcactgttaaccaagaagtcatcggcattctcagcgtcaagttaagcccataaactaatcagccataaaaaggctgcatcaaaattacttttgatgcagcctctggttcaagcatagactaactacgctttgtttgttattaatctaatttccgttccaactcactaacaatttcagcatgttttgcttccgttaatttaatcttagccatgaagattaacgctgaaataaccaataacgccattggaatgaagaacatgtacattttgaattgcaacaaccccgcgttagtgatatcgcttggtttcgcattcccagtcatgccagcatgaatcgcagccgttacaacgacgccgtttgcaaaagccccggctagtttatccaataaaggtcgcactgccaatgttacagattcattccgtgtaccacttttcaattgtccgtattcaacactatcggtaatcgtcatcaaagcagccaaaaagaccagtggatatgggaagaagaataagccgaccgcaattaagactacgaccaagttacttccagcaaacaagaagaggatataaccaagcatcatcattgcgattccgccaatatagattgcccggcgatgaattaaagcaaccaatgttgggaacaacgcaactgacacaatccctaagatggcagtaatcacaccaaccgttgagaacgctgcggcgcggcccatgacatatctaaaataatataaaagcagtgagttcgtaatcacataactaaaggcaaataagaaatatgaaagagataaccacattaattggtcatttttaccaatcacactgaaaacgtcacgtaaccgaaccttttcagtattttcccgaatagcactcttttcttctttggttcctaagatggtcgctaaagcgcctaagaatgaaacaaggccaatgacaacggcaaaaccgaaccacccggcactggtttgttcactcccatgactcccagaaaatagttgcgagaagaaaaccaccattggcacgatcacgataatgaccccttgtgcacctaaagtggatccgaaacgcgcaatcgccccaaattttgtccgcttttcagaatcaacactcagcgctggcaacattgaccagaacgagatgtctttaaacgagtagaagatatctaaaatgacgaaaacgattgcaaaaagaactaagtaaagataagggctacttgtcgcaagccctccaaagttggtaaaaatcatggccaagccaacagagctaataattgaccccgccagtaaccacggcttaaatttcccccaacgcgtccgtgtattatcaaccactccaccaatcagcggatcgaaggcaatttcaacaatccgaatgaccatcattgtataagtgacatacgcaatcatttttgaattaaagcctgcatttttggtatcgaataattgactcgtgacgaacatcataaaataagtgctaagtgttgcataaaaggcgtcatgcccaaaggccccaaaagcgtaagaactatactgtttaacatcttttagttttttcatttctttagattcctttcgatagtttcttcattgtaaacatgctttcatcaagcacaaccctcgggttatcccgcttgatgacgcactctagtgatagcgatgttcgataattttttccaaaatcgcttggcgttgcttttctttggctgagccgaattggttttcttccaatgaattaaaatcgttggcgagtaaaactgattctagatataacgtcaattgacgcttgatataaaccttattgtcttcattcgtttgcttgggattcccagcgataattgctgcagcaaattggtctggatcgataataattttgttgtcgttcatcctagtcgcttctttctcttttagttagtaaacgtttactatttacaccatacaaataaatcaatctgtacaagaactatcctgtaaacgcattcttttagatcgcaatcttattttactaaacttttagtaaaatgtaaacggttatttggaaaccgttacattcatcactggttacagttatgaatttaatttcactaaatatttatttttttattttttattgaaatttaatttcattagcgctatactgcatctatagaaaacgctttaaaaagaaaggagttgctttatgtttggtttttctatctatcttaatcaaccgttcacctcagcaaaccgcatgaaccttcaaaaaatgcacgccgctggcttcacagaagtcttcacgtcgatgcatattcctgaagatgacatttcacaatacactgctagaatcaaagcactcagcactgcgtgtcgcgaagaacacttacaattgatgattgatattgaaacaagttcattaccagcagttggtctctcacttaacgatcccgccgcaatactgtcctttgggattactggtttgcgaattgatttcggcatcgataattcaaccattgctaagttatcacaatatttgaagattgccctcaacgcaagcacaattgccgaacaagatttagccgttttacgcgcagctggtgccaacttcgctaacatagaagcttggcataattattaccctagaaatgaaaccggtttagaacgaacctggtttactgaaaaaaatcagtggcttaaaacgcaaggtttaaccattcaagcttttgttcctggtgatggcattttacgcggaccacttgaagaaggattacccactttggaagcccatcgttatcagcatccgcttgctagtgcgctcgatttattcaactgtgaaacagataaggtcttcatcggtgatccaactttagcaaaaaccactctagcgcaatttgatgcattctaccatcaacacgtcataaccttgtacatgcttaagtcagccccctgccccccttatctttttaaccaacatttccataatcggcgcgatgtcgcccgtgatgtcatcagattagaagaaggccggccactttgtcagaccacaatccaacctgaacagacatcagtacgattacgtggcagcatcaccctcgataaccaagactatggacgttatatgggcgagttacagattaccaaacatgacctacccgcagattctcgtgttaacgttcttggaaaagtcatccaaaaagatcacgcattactgccattcattcaggctggacaagccatccaactaaaggagattgattaatatggatttaagtcatttaacaaccgaaaaccgtaatcaaaagacaatgcaattggacgaactttcaattgaaaaagtactcacactaatgaacgaagaagatcacaatgtgccagaaagtgttaaacaagcactccccaatattgaagctgctgttcaagttatcattcaaagtttccaaaatgagggacgcttaatttatatgggcgctggaacaagcggtcgtcttggtgttctcgatgccgccgaatgtgtccctacttttggaacagaaccggaactggtccaaggtttaatcgccggtggtatgcaagcaatgaccgttgccgttgaaggggcagaagattcaccgacattaggtcgcgaagacttggaagcaatccacttaaccgctaacgatacagtagttggtattgcggctagcggccggaccccatatgtcatcggcggtcttgattatgccaaccaaattggtgccagtactgtcagcttagcttgcaacttcgatgccctcatcagccaacatgccacaattaatatagaagtcgaagttggtcctgaaattttaaccggttcgacccggctcaaatcaggtactgctcaaaaattggtgcttaatatgttatcaactgcttcgatgattggaattggtaaagtctacaaaaacttaatggtcgacgtgaaaccaaccaacgaaaaattagttgaacgtgccaaacgaatcatcatggctgcaactgattgtacttacgatgttgcggcaacccaatttagcgccgccaacgaagacgttaaactcgcaattgttatgattttaacggatttatcggctaatgaagccaaagaacgtttaacacaagcacacggttttgtacgtcaaactattcaataacaaaccttaaggaggcactattatgactgaaaaaaaagaagtacgcttagccagagaaatttacgccgctgttggcggacccgcaaacgtcgctaaattaattcactgtatgacacgtgtgcggatgacaattcgtgacgatgatcaagttgatatgactgcgttaaaagcaatcgatggcgttttaggggttgtcgaagaagacacgcttcaagtcgtcgttggtcctgggattgtcaataaagtcgcccaaatcatggtcgaccaagtcggtgttaaacttggtgaacccttcccagaaaatctcaccacaactgccacagccgcaacaatgaccgaccgcgaaaaagtcgaagcaaaagccgctgaagttaaggcaaaacaaaaagcaaaacaaaagagtacgccaaccaagcgggtcttaaagtcgatttcaaatattttcgttcctttaattccggttttcgtcggcgctggtttaatcgggggaattgccgccgttctatcaaacatgatggtcgctggatcccttggttcaaactggtctgaattcattaccatcttaaacgtcatcaaaaacggcgtcttcgcttatctcgcaatctatgttgggattaacagtgccacagaatttggtgcaactcctggtttaggtggtgtcattggtgctgttacacttctaagtggtgttgatcctaagttgccattacacaatatcttcaatggcgatcctttatctgcaggccaaggtgggattatcggtgtcatcttcgcagtttggattctctcattggttgaaaagaaattgcatcaatttattccagattcaattgatattattgtcacccctacaatttcattattattaattggggtcttcacaattttcatcgttatgccggtagccggtgtgatttcaaattcacttgtcggctcaattaattggattctgaatgtcgggggtgccttctctggtttcgcgctcggtgtactcttcttaccaatggtaatgttcgggctccatcaagtcctcacaccaatccatatcgaaatgatcaacaaaacaggttcaactttacttttacccatcttagcaatggctggtgctggccaagttggggccgcacttgccctttggattcgttgtcgtaagaataaagaactcacaaatatgattaaaggggcgcttcctgttggcttcctcggcattggcgaaccgttaatttacggtgttactttaccattagggaaaccattcatcactgcctgtatcggtggtgggattggcggtgccgtcattggtgcaatgggcggcgttggtgcgattgccatcggacctagtggcttagccttaattcctttaattacaaacggccatcaattcgcttatatcttaggcttgctcgcagcttatgccggtggctttgtcgcaacttatttctttggcattcccaaagatgctacaatggaaaaataacctttaaaggacgctgattttatggaaagcatacttttttcaattcaaaagaaactcccaactttaaccaaaacagaacagcggcttgctcaatacgtacttgcccatccagtacaagtaccgacaatgacaactagtgcgtttgcaaaagcggctaacgttagtgcagcgactgtcgctcgctttggtaaaacactctgtggtcaaggtggctttccagcactcaaattacgactttcatctgaagggaataccgatcaacggctcttcgatgaaattaatccgaccgatacaacaactgacttaaaaaataaactaacttttcgaattaaccaagcgattactgaaaccaatcatcggctcaagaatgacgcgctcgaagaatccgcaatgattctccactcgaaacaaaccattttcatttatgggcttggtgcttcaaacgttgccgctgaggatttacaacaaaaactactgcgcgttggtaaatctgtcattcaatcacttgatacgcatctactggcagcagcactaaccacacagaaaacacaggcagcacttatcttaatttctaactctggcgaaaaacaagagcctctgcaacttgctaaaattgcacaacaacttaatattccaattattgttttaactcataataatcaaagtcaaatcgcacagttagcaaccatcacgttacagcatgatgatagtactgaaaacagtcagctaagaagcgcggcaacgacttcattaattgcacagctttacgctgtcgacctactctattacagtttcttagaacaagatttcaccgctaatacgaaccaattagctgattcatcgaacgttatcagcgaatattttactaagtagaaggagtcatcattatgaaactattctcacgtaaacccaaagaactcgaattacacgctattgtagatggacccgtcatcccgctcaaacaagtaaccgacgccgttttttcaacaaaaatgatgggtgatggttttgcagtaaaccctagtgatagtcatatctactcaccagtggacggtattatctctagtgttttcccaacaaaacacgcacttgggattacaaccaaaacgggcgttgaattattactccaccttggcttggataccgttgaattaaacggtgcgccgttcaccattcacgttcaagaaggcgatccggtgacaacagaccagttattagttgaaatcgacttagctgcgcttgcttctgcgggtaaagaagcaaccagtatggtgattgtaaccaacatagacgatatcagcggtgttaatgcccccctaacaactagcggacaccacggtgaggttgcacaaatcattaacttataaaaataatatagaaaagccccgctcagatgagcggggcttttctatattatttggctaagactgttatttgattattataacatgcttgattatcaaactgcatcaatactttagtcgctagatcttgcgttgcaaaaactaatctttcaactggcgtatttgccacgttgtaagccatcatgtgtgaaaaataaacaaactgtaacatattactgtatgccgaagcatcgccttgtttcacaatttttttaacgaaaaaattaacgatatgatcgccaaaacgaacataacctggaatcgaaatcagttgtacgttggactgtttagcagcctacacacgattggccgcattatctggcgcgtaaatgaccgttgtccctgtcgtttggtctgttggttgcattgtaattaaagctgtttttgacattaatagatactcctcttaagtgatgataaggtccattgtaccagagattaccgtttattttagtaattctagaaaacggttctgccaaacgttttcgtaaaaggcaattgtctgttcagccgtcatataggcgttgtccgttgtagttgaaagaccagctaccatttggagttggtagcccaaatggtgggcaactttaatcgttgtatcgacgcagtatttggtctgggcaccacaaatttcaagcgatttgatttgcatttggctcaataacgtttgtaagtttgtctgccaaaatgaatccgcatgcgttttttgaacaaagattgccgttttaggcacattcaattctggcattatctaccaagtcgactgaccagcaattaaagtcttatcgttatgttggacaaaaataatcgggcgactttccgcctgataggcatcaattctggcattaacgcctttaattaattgattaagacgcgcaacaggctgctcacttttgcagacaccattttggagatcaatcactaataaacaatcggctaacttcagcattagtcccctctttcctttaaatcaaatcgagtatatcattatttaactaaacttcatattttgtctgacgatattaaaaggaagagatgcggattacccccacctcttctttttcaatgtctccgatgtttttcccgcttcttaatctggtgttgctgaaaacggctgtattgtatggccttcttttcggcatgttgttcagccctattagttgcatgttgtgctttacgttgacgacccatccgaatctttttgttgataccaacgaattgaataccaatgataactgacttggcaccctcaaccacttgcatttaaacaattccttcacatgattatcgctcaatcccccactttcccgccaaaagcgttatactatggataataaataaaaggagtgttttgacatgcaaaaaccaattaaagggtcatgtaccacggtcttagtcggcaaaaaagcttccatcgacggttcaaccatgatttctagaaatgatgatggccacgaagctttggatccacaacgctttgttgtggtcaatcctgaagaccaaccccggaattatcaagcggtgattagcggcgttcaaatccaattgcctgataacccaatgcgctatacctcaattcctaactcattattgacgaacgggatttggccagctgctgggattaacagtgaaaacatcacgatgtctgccacagaaacgattaccactaacccccggattcaagggcttgatccttttgtccctggtggcatcggtgaagaagatattgtgacattagtcttgccttacatccacagtgctcaagaaggggtcgaacgtttaggcgccctccttgaagaattcggcacatacgaaccaaacgggattgccttttctgacaaagacagtgtttggtggcttgaaacaatcggtggtcatcactgggctgctgttcgcatccctgatgatgcatacgtggttgcccctaaccggatgaacatcaatcatttcgactttgattcagccgacacgctttgctcagctgatttaaaagctttaattgatgataaccacttgaatccagactttgaaggctacaatctccgtcatattttcggcagtgcttcaatcaaagatacggtttataacaacccacgaacatggtacggtcaacaatacttcaatccagaaatcaaacaagatccaatggaccaagatttaccattcatctgccatgccaaccgcaagatttcaatcgaagacgtcaagttcgtcttgagcgctcactttgaaaatacagaatacgatccttacggtagcgcccctgaagatgttaaaactcgtttccggccaatcggaattaaccggaatcataacgtgcatattttacaagtgcgcaacaacgtgcctgctgaaattgccggtattcaatggttagcttatggtgccaatacgtttaacaccgtcgtgccattctacacgaatatcaacgacacaccagaatcatacaagaatgccacaggtatttttgacttgaacaatatgtactggttaagttgtacaaccgccttacttggcgatacagattacgacttctacgttgatatgcgtaacaccttcgaactcgaagcaatgagtgcctatcacgtgatccaaaacgaaaccgacaaggccttcgctgatcaaaaagacgctgcagccttcttggaagccgctaataacaaactagctagcgaatcacttaaacgccaaacagccctacttggccaaatggtgatttcaggctcagaacacatgaaattacgctataacttgaacgactaataattatttaattcaaaaaagagcgtctcagctattcgttagttgaaacgctcttttttgagttgtcctcttttttcagtagcgtataataaatactattactcaaaccacactaaggaggcatttatcttttgaaaccccaaaaattaaaactatcggattacttactcggctttggattcgtattattgatggtcggcattgccactgtcttgaacgatgttgagattattctacccgaaatcgcagccttaacaacggggctgtggatttatcacgaaccgggttggctcaatcaacccgccaagatattttggctgccatcgataaccgccatcgttgggtttggcattaatcggttgccgctcagttatgcagttaaaattagcttactactactcatcatgattgttttactttgtttatttcgctcaacactcgcaccatcgtttgcaacggggctgttaccgattatcgtcaacgccactgaactttcattcatcattgcaattttaggctttacgctcactttgatgttggtcgttagcctccgcaaattgcatctgcaacatccctatcatgccacgattaactatcgcgtcatgctggtttttctaatcattgcactcttatgggtgttagttgttagtttactcggccggccacagatggctgccattccgccggtacttgtcgtcttttttgaaattctacaaaaaccaatgtatccaggtaaaatggccatcaagcagatggttgcattaactggcgccgccacaatcggattcgtcgcttatagcttacttgattcacggttattggtaaccttaattgcactgccactagtttgggcattactctatctgctacaagtcagaattcccgccgcctacgccttccctttattggccattattctcccacaccaaatgtttcaaagtttgccgctcgtcactttactggcaactagttactttttgggggctgcttatttataccagcaatacattaagccgcgtctcatcagcagataacatgacggtttacgactaatgagggccaaccgtgggcggataatcaacattcgcaaactgctggtcaacgcggtcccgttttaattcaggattattaattgctcgaaaaactcgcgcattttaatcgtgaacggattccagaacgggtcgtgcatgctaaaggcgccggtgctaaaggttacttccaactcactaaggatatgagcgcctacacaaaggcagccattttcagtggtgctggtaagaaaacaccaatgattgcgcgcttctcacaagtagctggtgaagccggctatcccgatacttatcgtgatgtgcgtggatttgcccttaagttctataccgaagaaggcaactatgacattgttggtaataatacgcccgttttctttgttaatgatcctctgaaattccctgatttcattcactcccaaaaacgagatccacgaacacacgcgagaagccaagacatgcagtgggatttctggtcactttcacctgaatcagtccatcaggtgacgattttaatgagtgatcgcgggattcccgctagttatcggatgatgcatggctacggtagtcatacctttaaatgggtgaatgctgctggtgagcagttctgggtaaaataccacttcaagacaaaccaaggcgtccataacttaagtaacgaactggctgccgaattggctggtaaagatacagattatctacaaaatgatttattcgatgcgattgaaacaggcgaccatccaagttggaccgttgccgttcaacttgttccttatgaagctggtttaaactatccgcaagatatctttgatgtgacgaaggtcatttcacaaaaggattaccccttaatcgaaatcggtcaaatggtactcgatgaaaatccaaccaacaactttgaggatatcgaagaattggctttctcacctgctaacttagttcctgggattgaagcttcccctgacaaactcctccagggacggttgttcggttataaagatgctgaacgttaccgtctaggtgccaactatgaacaattacctgttaaccggccaaaagtgcccgtgcataattacgaacgcgacgggatcatggcaaaaaaccaagagacaggcgtcaactatgaacctaatagtgaagatggtccaaaagaagtcccatctgccaaaattcatggcgaccaacttagcggtcaaaccggtaactatccagccgatcccgattactattcagcagccgataagctttacaacttactaactgatgaagaacaagatcgactaatcgaaaacattcgcttaaatctcggccaagttacaaaacctgaaattcaaatccgcgaagtcaaacagttctaccaagcggatccagaatacggtcgccgagtcgcaacggcattaaatttagatttaaaccaatttgaacactaatctatacaaaaagaaggtatccggcccaccggataccttctttttatttatcttcttttggagaatcttgttttgctgcccattctttcttggtcatcaagtcagagacattcattttaatcttcgtcacgtttaaaccagtcatttgatgtactgatttagcgatgcgttcaattgtttgttcgaagatgtctggcgctgatttaccgtattccaagatggcatccaattcaatcgttacttcttggttatcaatatcagcgtcgacgccctttgtcggatcttcttggtctctgaaacgatcagctaattgactcatcatcccgcctgataattctaagacgccatcgatgtcatgcaccgtttggcccgcaattttttcaatcacaccatccgagaagttcaattctttttcgattttttcggtatgttgatccattgtcttatccatcattttatccattggtttgtttggtttatccatcgttttcatcatcctttactatttttattgaacgcgtttttcagaatcacttttctttggattactgccttgttgttgccattctttcttagtcataatgtcactgacatggctgttaacttcgacaacactcaaaccggtcattgattcgacagcttcagtcactgcagctgttaatcgttcgaaaacatcccgtgcattccggccgtattccaaaataatggtcatgtcgattgcgacctgtttttcgccaacttccacactgatgcccttcgttggatcactatcgtttctaaaacgatccgcaatatcactgaagaaattaccgttcatcgataataagccatcaatgttttgcgctgtcttaccagcaattttggcgattacagcatcttcaaaagtcaatttgctattggccatcacttcatctaaatgtgcttgttctaccattttgtcacacctccgttatttatcctgcttcaagacccggttaacttgtgatctaaatccttctaggtcttccttagaccctgttaaactagctgcaatgtagccgagtaaaccagcgatgataatcaagattaaactcataaatccaaaactaatccaaatggctgccaacactgccccaacaacaaagccccaataagaacgtctcatttgtctcacctcacatcactttttgcctgattacttagcggtgatagtttgacattcactgctttaatcggcatctcaaagattgtttgtaatgcttgctgtaccgtttctttaactgcccgtgcttgttgatcgagatcgttgcgatccactgcgaccgcttgaacgtcggcagtcacttttggatgtcggcctttaaacgtcgtatggactaacacttccttaacacggtgtttttcaataatagcttgtgtcactgttttttcaaccgctttgcgggaaagtgctagttcacctttatcggtcttgatgatcatttggcgttttttcggtggactgaataatgccaatagcagtaaatataagaaaattaagccgctaagcactcctaatccaagtccaaaattaccgacccattgttcgggtagccaactaagatgcataaattgcttattggattgttgtagtggatagattaatgtgataaaccacgctacctgacacaacccaagcaaactggctaaactgatcaccactttagttaatttattcatggtgtccgcccctttgtattaggattttctacgtgtgaataataatgaaacaacgaaaacgacaatcacggcaccgataatggatggaattaaggccatcccggcaagctgtggtccccagctgccaaacaatgattggcctagccaggcgccgactaacccaccgacgatattgccgatccaacctgcaggtaaatcacgacttgtcaatgcccccgcaatcaccccaattaaagcgccaataattaaaacccataaccaatgtaacataacaatcatcctttcttgtttccttaaaatatattgctggttctccataaatgtaacaaattcaaccagcatccgtaaaacaatacgcttatcaatattattaaattatcgtaaatgcacttgtttaattaattgattcgccaccggtaacgccgtaaatttgaccggtaatatagcttgctgcgttgcttgctaaaaaaacatatagcggtgctaattccgccggttggccggctctttctagcaatgtattctgcccaaacttaggcaaagccccttccagttgtccttgagccaactgcaacggtgtccaaatcggacctggtgcaaccccgttgacccgaatacctttatccgctaattgttgcgctagattgatcgtaaaattcttgattgctgcttttgttgctgcataatctaacaaatgcggactcggattaaaggcttgcactgaagtggtcgtcagaatactgccgccagccggtaattgaggcaatgctgcttgcacaagcgcatacatcgcaaccacattaacgttaaaactatcttgaacttgttctattggtaattcggtaattgatggatgcgcaatttgttgagctgcgtttaagactaatgtgtcaagtgtgccaatttgctgctgcgcggtttccactacttggctagcaatctgtggtttccgaaaatcagctgggatcaatgcgattttacgccctgcatctcgcaccaattgagccacttcttgtgcatccacttcttcacctggcaaatattgcaatgcaatgtctgctccttctcgggcaaacgcaattgcaactgcgcgaccgataccagaatctcctccggtaatcagcactttacgatctagtaaccgttgtgcaccatggtagtgttcttcgccacaatctggcttgggatgcatttgatcttgcaatgccggactagcttgttcttgttcttgaaatggctctgtccgataaagtgttcgcggatcttttaaatctggtttacccatcttcttgttccctcttttccaattaatctagatacactgcttttaaatgttcaatgtcctgcgttgttaatcctaaggcctgttgtaaataggcttgagttgaaccataatcctcattgattatgcgctcagctgtgcttaagtaggactgatcaacactcatcaatgcatgcatactttttaaaaagccgcttgaggcatctttttgacgtagcgtcttaatgcgggctgcaacgtgttccctagatgctgtattcgataatagataatcatattggatcacatcttcaggtgccccgagtgcatttaataaataataagccgccattccggtacggtctttgccacctgtacagtgaaataaaactgcttgttgcggatcggcttcagtcaataatcgttcgaagaattggcgatacattccgattgaatagggatcttgcaccatttctcgatagacttggcgcatttgttgctgcccaccaagcggattattggtgtagcgctcataaagttccgcttcactcgccgtactttgcgtcgcatcttctttaaaaattggcaacgattcgtaagatgccgtcgtaatctttttatctggcgcttttttgcgctccattggtgaacgaaaatccacgacataggtgatatggtagctttccaagagcaccaattctctcttactaagattcgccagattccccgttctgaataatcgatgcggtttaatcgagcgaccatccagtgtttgatagccacctagttctctgaaattgtagccatttttaattggtaatatgcgcgaaaccatcgactcatcctctctaatcaaccactttggctgctaggatcattgattatcatccaatttttgaagacacctttttaccgtcttgttactaaaaacacgaccacgatgatcaaattccaatggcccccagctctcaccgacgagggcctcaccgttattctctcttaaaattgcttcctccaaatcagtcataccttctagaaaacactttagattggctgattctttcttaatcaccaagcacaattctggggtcttgactgtactacgacctaacctaactttcctaattcggacttctttttgcataagcaaccttcctttcatgaaatctttaataacgctacaccatcaatataaaacaatcacatttattgatgcaacttttatgattacgttttgttattgttagcataatcatttacctttacaaagattgttgaatttgtttaaataaagacacaacacctaaaaggagatggttattatcaacgctattaatatcatgtttgccgcagatgaaaactatggtgatcaacttttaatcgccgtaaagtcggttctaacccatatttcgcccaaaactactattaatttttttattctcgataatgaactcactccgcaaacgaaacacgctgtttccaagcgcgtcccacgccccaatcaagttgagtttattgcacttaataagcagctttttgaaaactgtcctgaaagcaaccatatcaacaaaacggcttactaccgcattttagcgccaactcttttgttgcgaaaaaaaatcgaacgtgtcttatatttagatgtcgatatcctcgtacaaactgatctcacgccgctatacaatacgcctttgggcacaaatatcgtgggtgccgtgattgatcctggacaagcactcacactgcgacggctcggcatcaccccaccacaatcgaataacatctacttcaattcaggggtcatgctaattgatacggttcggtggaatcatgcatccatcacagagcggactttccacttcatcaatcatcatgcggatcgcttacaattccatgatcaagatgcgctaaatgccactttggttggtaaagtgaaactactccatcctaaatggaacgtacaaaactcattgctctttagaaaacatacgcctatcaacactgaatatgcccatttatttgatgaagcaatcgccaacccggcaattgttcacttcacaacacacgagaaaccttggaacactctaaaaagtcaccccttcttaaaccaatatcaaaaggaactcaaacaattacatgcgcaacaatccgatataatcaacattgtatcggctgtcaattccgatttcatcgaaacgctggcaattctatacgcctcaattcttaatcacaatgactcacatcgacactatgctttttacgtcttagaagaccacctcaccgcacgagataaagcagtcttacagcatgttgtggctcgatttgatgccgacttgacctttgcagaggtcaacgaatctttactggccaatactgttgaaagtgatcggatcttaaaaacggcgtactatcggattctaattcccgacgtgttccctcacctcgatcgtgcactctacatcgattgcgatgcgctatgcctcacagatttagcccggctatgggatatcgacttaggccaatccttcctcgctgcagtagaagatgctgggttccacgaacgcttagaaaaaatggctatcgattaccaaagtccgcgttactttaactccggtgtgatgttactcaatctcaaaaaatggcgtcaacacaatattgtcagccgtgtactcgacttcatcaatcagcaccctgagaaattacgcttccacgatcaagatgctttaaatgcaattttgcatgatcggtggattcaccttcaccctatgtggaatgcccaaacaaacattttgatgaacaccatcacaccaccaactgaacacctcaaaaaacaattcttagaaacccaaaaagaacctgcgcttgttcacttctgtggtcacgaaaagccatggcatgcctcatcttcccatccattcacaccacaatatcgttactaccggcaacggttcttaaaacaaaaaaagcggctcgttcccttcgccaatcgccgttccctttctcaacaaggataactacaaaaaaagcgggtgcttagacaaatttatttttgtctaagcacccgcttttttaattgctaaaaattatctttttattgaccgactaagccatcatgaatcttatctaggttccacttcatcatcgtatagtaagtgtcaccttgcttccctctttgcgcgagtgagtctgtaaaaattttcgcataaattggtaacccagtttcctgagcaactttttccattgatttcggcgaaacagaactctcaacaaacagatgcttaacatctgaatctgcaatttttgcaagaaccgtcttcatctgttcaggtgtgccttgcgactcagtattaatttcccaaatgtaaaccggtgtgacctgataggccttaccaaaatacttaaaggcgccttctgaagtcaccaagacccgctgattagctggaatatcggcgaatttagtttgcgcatcagtatgcaatttgcgcaaacgtgcagtgtagcgatccgcatttttgcggtaatcatcagcgtgcgctggatctttggtctgcagcgctttcgtaatgttttcaacgtattgaataccgttcgccaaatccaaccatgcgtgtggatcgggttctgtttggttagttgtcaaatgttgcacctgaattcctttgctagcagcgaaaacatccttttcgaattgcttatgcgcgatcttaacaagttttctaaaccaaccattgccacccgtttcgagatttaacccgttatgaaaaatcacatccgcatcagtcgcttttgaaatatccgtcggttgcggttcatattcatgcgggtcagttccccgtttcacaatactgtaaagttcaatgtggtcttgaccaacattatggaccatatcttcaagaatcgaattcgtggtcactacacgtaatttagtctgctggttcgtttgttgttgtttagattgggcgcggtgctggatgaaaccatacacaccacccaccaaaccaaaaactgcaattaacgtcacaatcatttttttcatgctggtcgtcctcctttgcgccacttaaggaaaccttgcttaggcgcgcagatgaatgaaatggcaaagagcacggctgccatcagaacaatcgccggaccagatgcccagttcaatgtgtaactgaagtacaatccactgattgctgacacagcaccaatcccagccgataagaagagcatcgtcactaagcgatccgtccataaaaaggcggtggctgctggggtaatcaacatcgcaacgaccaaaataatcccgaccgtttgtagggctgaaaccgtgactaaggttagcaccaacattaaaccgtaatgtagcacctgcgtttttaacccatatgttttcgcataggtttcatcaaacgaggtaatcaataattctttgtagaagaatgagacgaataagatcactaagcctaagacaatcgccgtactcataatgtcgctatcactgacggcgagaatgttcccgaataaaatatgatgtaagttggttgcactttcggccatcgaaatcaggataaacccaagcgcataaaaggcactaaagacgaccccaatcgaagtatccgtcttaattttactatgtgttgcgacaaagccgattaagaccgccgctaaaataccaaatacagatgcgccaaccagcacattaattcccaacatgtacgccactgcgacacccggtaacaccgcatgtgaaatcgcgtcacccatcaacgacatcccgcgcaaaatgatgaaactcccgacaatgccagacatgatgccgaccattacggcggtcagcaacgcactctgcaagaattcataacgacccaacgcactaataaaagctggaatactcgtcattttgccacctcctgtgcatcaaacaagacagcggataagtccgcactaaaagcacgctcaatgttttgcgcattataaactttttcagttggtccataatcgacgatgccgtggttcatcaccactaaatcatcgaaatattgcgatactttattcaaatcgtgatgaatgacaatgattgttttacccgcatcacgccactgtttcatgattgccatgatcgcggtctcactctgtaaatcaatcccaacaaacggttcatctaaaataataatatccgcttcttggacgatggcgcgtgcaacgaaaactcgctgtaattgtccacctgacaactggccaatttggcgttgcgcaaattcgctgagcgatacttgttcaagtgccgcgcgactggcttgttttgcctttttacccggatcgcggaataagcctaacttgccatacgtgcccgttagcaccacgtcaaaaacgttaattggaaaatttaaatccaaatctttacgctgttcaacgtatgcgacttgcttctgaactgcgcgcattggtcgatcttgatataaaactgagccttgccgtgccttaaccaaccctaatattgctttaatcagagttgatttgcctgcaccgtttggtccaatgatgccagtgattttgcctgcgtcaaactgaacggcaacatcagtaaatactggtgtgtcatcgtaagcaacggtgaggttcttaactgataacataaagagcctccattcttttaggtaaacctaacttttctcactacagcatacatgattttaatggaattaacaaatattttagtttaggctaacttttcgggatttctgtggaacaatggcttaggatgtttcacgtaaaacataataaaagagtcgcgctatttttaaacagcacgactcttgttattaattagaaatcttcgtcagcatcctcatttgaaacagtgtattgataaatccccttttgaccagatgctaatattttatctgttaatgcatccaatcccaagttgtcacggttgatgaataattcaagtaacatcggtaaattaacacctgatacgagtcgatactgtggcgcatcccgaatgatatcaaccatcacattaaaaggtgtcccacctttaatatcagtcaatacaaaaatttcagatagtggttcaaatgatgcaaaacttctattaatttgttggcgtaaagcttctgtcgtttcccccatttcataagaaacaactgctaaatgcgcttgttgcccacaaatcatttcagcagcttgaactagacctctaccagcggcaccatgcgtacaaatcacaactccaatcatctctgttcctccagccattttaatatttcaattgacgatagtaacgtctaatttccattggatggcggttcaagtcttcgatgtgcacatcaattcgctcattgaccgcatgcaagataaatggtgataatgcaccgcggaattctggtgaaatccccggcatgtcgtaatctttcgcatcgataaccgtataattagcacagatttgtgggatgaagttagcaacgcgttcgctcaattgtcgttgactgtcttctgtcacgtaaattgtgactggtgtatcgcgttcaacaatttcgaacatcccgtggaagaattcttgcgcttcaattgattttgttctgagccaatgttgttcttcccaatagcacattgcatatgaatacgtagcaccccattggttaccagccccaacaaaataatgcatttcatcttcgtgatgtttcagtgcaaattctgtagcaaattcgtccgcatttttataaacagccacaacatcttttgcaaagttatcatccatttgtttgtagaattcgtcgtattgatcgaattcccctgctaaatacataaagcgatcacctaccatgaagaacttaagttgttcattcaatgggtatgaaattaaataatcacacatcgttgctaaatcggcatctgcacgatcaacaaacccaattacacgtgcaccaatttcattacatttcttgacagcttcgaccatttcttgcgtatttccagtaactgaagaaataatcacaaccgtgtcttttgtcactcggagattgccagttgttaagaacgaagctgcgttttcgtagaatgtttcaatttttgttctttctttcatgtgaacgaccgcttgcatggatgatgcataagtgccaccgatcccaatccaacaaatattactataaccctcatcattaatttgatcgacaattttattaatgtctgatctgagtgcaattccgccttctaagtttgccaataattcttttccgttaaatttcaacatctcaatttccttctttcaattttttatatttttgaatttgtaattggatcaaaatctggaaaagctgacacttttagattaatttgcttgcgcgctgatgcggtataagccaataagtgaattggaatagtcataaagagtggggctaacaactcatcagttggtaacgctaagccgaggtcgtcttgacgatcaacttggccattcgtaattcggacaaccttcgccacttttccggttaaaaatttttgtaacttagcgactcgctcttgtaacttcccgtttggttcaatgaaaatcacatgatcacttgcgtggagtccaatataagggccgtgcatatactcttcaacttccttaccgagtgcggtaatacgcactgtttctgtaatcttagtttcaccttcacgggccacaccgtatgtgccaccataaccaacaaagattacgcgttgtactgtatcaaacacatcgctataatgcgctacccattctttagcagcatcaatgatgcgtggtaggtcagtcacaatgttttcaatcgctgccaaattcgtttgataactcgcttgatcctgtttacccaattcaagcgccaacaacattaatgtcaaaatcgtggcactatagccagcggtcacatagggcatctcttcaattggcatccctagtggaatcacatgctgacttagcttggcaatcggactgttttcatcaccagtgatggtataaatccggccgttgattgcttgaacccgtttgaccatctcaatcgttgagtagctatgcccaccctgggaaatggcgatatacaacgtatccggttgcaggtgcaacatatagttcgccgtaaaagatggctcctcgacaaaaacaggaatgcccaattgctggctcatataaggctgtgccgcaaacgccgcatttgaactcgatccagttgcaaaaatcacaacatttttatatgccgttgatttgtcattcagtaacgtacgcaatatcgtttgccgattggctaatatatcagcatagattttcggttctgcttcaatgtaatgcaacatatcctgcatgcttgctgcctcctacttcagtagacctgtgtaagcaccaaagattccaattactgcaattaataatagaatccagtgtgctttcaagccttttttatctaaccagaaaataaagagcgtaaagagtaatggcaagatgcctggtacaatcccatcaaaaatactttgaacagttggcgcacctttacccgcaccaatcgtcaatggcatcttcagcgtcaccattgtcgccaccatcgatccaacaacgcccagccctaagacggaagcgccaaaggagagtttatccattaaacccgttttttgaactttttcgatgaagcccgcaccgatattgtagccaatgaataacccgtaataccgtgctaaaacagccggaatattgaagattaacaggaataacagcggccctagcagattcccttgaagcgctaaggaagtcccaattccggtcgcaattacccgcaacgtcccccagaagaaggaatcccctaagccacttagcggacccattaacgcaatcttgatattgttaattgcatctgtgtcaaaattttcatctaatgccgcttgttcttccattgctaccgaaatccctaatggaaatgtagaaagccacggcgttacattataaaattccaaatgtcgtttataggcgctcgttaatttttctttactgcctttatagattttatttaacgctggtgtcattgcaaacgagtagcctaaatttgattgtcgttcataattccaggcccattccatcgtgaaggagcgccagaaaaccttcatcaaatcttttttcgagattaaactagaattcttcatcttcataatcgatgcctccattcgttgtacttgcagcaactgtctcgcctttatgtccattattgaaagctgagtagccagttaataccaatgcaagacaagccccaaagatggcaaccccagtaacagggactttcatataaaccgctaaggcaaatcctaatacaaagtaaattgcattgtgtttattgaccattaatttcaacaataacgcaaacccataagctggtaataagccggtcgcaattcctaaaccatcgatgacaaattttggaataaccgctaatgatgacttaattactggactcccaacgatgaaagaaattgcaacgattaagccgattggtaaattgattgagaagaacccaccgaacaattgcatccgatccatgccctttgaattaccctcggccgcgtatttatctgccttatgaacaaagtatggcagaacaaagatgaagcacagattcttaataactagcactaacgatgcaatcggaatgcccaatgttaacgcaacggctgtactcttaccggcaccaatggcaaaggccgttcctaaaatactacctgaaataatttctggtggaatcgaagccccgattgaaaatgaccccacaaaggccagttctaaggttgcccccatgataattccggttttcatatcacccataattaatccagcaatggtacacgtcacaagtggtcgcgataacattgatgatccaaataaatattcagcattcgccaacatcgctgttaacgctaataatatggcaatcaatatatggttcatgagtttatcctccttttattctggtagtatcattttcttttcattcggtacttgttggataaagacgtctacaccagatttagaaagcgcttttaattgatcgacttctaaatcggttaagttaaccgccttagaataattcttcgttccttctcgttgttttgtgcccccaacgtttaacaatgtaatcttatcgcccgttcctttgattaatttctccgcatccgctactgattcaacaacaattaacaacttatatttatcggttgcgccagaattaatagcactaatactgtcatcaattgatttcatcactaacttcgcttgttctggcttcgccaagcgaattgctgatttacgaaagtcatcccccgccacactatcattagccactaaaatcgtattaacatctaattcgttaaaccaagaaactgcaacctgtccatgtaataaacggtgatcaattcttaaaaattctatcatgtgaagtcccccttaattaaaatcaatattaaattctgttgtatcagctggttcatagcgattcgaaatcccaatcactttatgattttcagcgtaatactgactgctcaatttaaagagcaacgcatcttcttctagatctaaatatttagcatgcgttgatgccatgctgacgagctgtaaatcttgctgcattccgtagaaattttccttagccgaattgacaagttcgatagtattgaccatctggatatccgcaagactcaaagtcggatataactgctgcggtaaaataatcgtttcgtaaacctgattctttttttcttgataaacatgtttgatggtatacaacaacgcgttgtcactgatatcaaataattccccataatatttatccgctttgcgaagatgaaattctttaatctgttttgctgcgttgcctaagttattattcttcatcacccccgtcatttctaaaatattttgcgaagaaatctggggtttaacgtatacccctacaccgtttttcttgataattagttctttagcaactaaattatctaaggctttccgaattgttgtccgacttgcaccaaataattgctgtaattcagcttcacttggcatcaacatcccacttttaaattcgctacgctgaatgcgagtttcgatttcgtctgaaatggtttcaaataagtattgtttcatcacaaatcaccatcctcacgataatcaaaaatatttttcgcatctaatcggtaacgaatttgatacccaatcagatactggacactatattcaaccggctcatcatcatgatcgtaagccaagcttgttacaatatataatggtgtcttctctggtatttctaatatgatagcctgtttcttatcggcatatcctgctttaatcgtttcatgcccgtagcctaagaccaccccatattgatccttcagtgtttgataaagggaccgattctgaaaagagatctgctcaatttctggaaagcgttcttgacttaaaaaagctaattcgtacgaaatgggtttcccattaatcattcgtttccgcggtagttcaaatacatgatctgccttcaaaaatcgaacaacatcttcttcgactggttcttcggtttgtgagacctcggtttgaatttcgtctggatttaactccgttgacattgaactcattgccagcatgttaatcacatgcttattgttaactgtcattcccacacgtggctttttttcaattagtccttcattttggaggactgataacgagcgccgcattgctgttcgactgataccatatcgctcagccaattctctttccgaaagattagcgaaggctcctttttggatatcgtatcgtaatcgttcctcacccaatgttgcaggtgagatttctttatattccaaagcgatccttcctttcaaattttaaagattaataactcttacaacctaattcactaaattaaaagatatagttttttatatttttaataccaaagtcattgtaagcgcttttttactttgtgtcaatcgttttgaaaaggtttttttaattggcatccattagttgattttgaatattggaaaatgacgttctagataaccagtgcattttaaagtttctaataatttattctcattattgcacatcaaatttaatgaatatatttcgtaattggcttaaaaacccgttaaatcggctttaataaggatttttaaagaactacttctctttaacaactacatgcaacagatttgcatatcgataaaaaacttgctaatattaactattatcagtaatgttgttaaatatgtatattaataaccattaattcaaaaacaatattaaccgtagattgtcggccatcactcgtcacataaaggagcgcgagacagttcttaaccgaataatgctaaaaatagtttctgttaggagtgctacctatgaaagatttctttttatccactaagtcaattacgttaatccgtatactagatcatattatccaagccaatgaagcacccatgcttcgggatattatgtatcatttctcactttctaaattaactgcaatttgctacttaaaaaagttgcaactagaccttgctgaattagacgccaatattcagctaacaacagtcaataaccgctatgaactcgattatcctgaaggaatgtcttctaacgcgattctttttgaacttcggttcgcttacattattcgaacaaccagctttcaagtgatggacgcgctttttaaacatcattataaaagcgcgcttgtggattaatggcggcttgatggccggtgacgagactgtcgacaacggcgacatccgtgccgcgttgaattaattgatcaacggtgtgcgagccgatgtagccagcgccacctaatactaaaactgtcatggttgtttccccctatgtaataaccttgtgtatcaattaacagtatatcatttggactgataaacaaaagcattgattggattattaaacgaaatataataatctttgctataatgggtaagttaatgatttggaagtagcgagggattaatgtggaagcacaatatgaatggcaattaaaagcaacaccaactgaccaagacttacaagcaataatggcagttgaagcactcccgaaagccgcagcccaattgttgtggcaacgaggaatcaaaacacctgaggcaatcagtgcgtttatgcatccgaatgtcggtcaattacatgatccatacgctttgtatgatatgcaaacggcagtcgatcgaatccaagcggctgtgatgggcggcgaaaaaattacagtctacggcgattacgatgccgatgggattacaagtaccgctttgatgcaagagacgctcgaaagtttaggcgccgatgtggaagtatatgtgcccaaccggtttaaagatggctacgggcccaatttagatgtctataagcaactcgttgaaaatgggacccagttgattgtgaccgttgataacggggtgagtggcttagagccaatcgcctatgcgcaagaacacggtgtcgatgtagtggtcacagatcaccatgaactaccaagtacattgccaaatgcgacagcaatcattcacccccgtcatccagagggacagtatccctttagtgatttatgtggggttggggtggcatttaaagtcgctacggcattattggaagaaatcccttacgagagtttggacctagtggcgattgggacggtctgtgatttagtgtcactgactgatgaaaatcgcgttttagttagcttaggcttacaacaattacaaaataccagtcgtcccggtttagtggctctttgccagtcagcgggtattgaacaagaaacgcttgacgccacatcgattggatttgggattgggccacgtttgaatgcgattggtcgcttaggtgatgccaacttaggtgttaatctattaacgactttcgatgaagaacaagcggtggaacaggcccaatttgtggaacaacaaaataaaaagcgccagggtcttgtgcaagaaattactgcgctagctagcgaaatggcacaaacacctgagaaccaagctagtgcgaccttagtgttggcacatgaaggctggcatgaaggtgtgctggggattgtggcgagtcatatcgttgaacaaaccggtaagccaactttagtgctagcaattgatctagcaactggccaagccaagggatcgggacgaagtgttgaagcatatcatctctttaaagcgcttgatgcccaacgcacattgttgacgcactttggtgggcatcatatggctgtcggcttaacgatgccagtcgatcaattggctgctttacaaacggcgatgaatacttatgccgctgataatcagattgatttaacaacgaaacccacattggcggttgatttacagctcgcattagctgatgtgacgcccgatgtttatcaagccatcagtcaattagctccttatggcacggataacccagaacctttgattgaaatgacggtgccatccgtcaccaatgtgaagcagatcggtgcggatcagaagcatttgaaatttacggcggttgatcaagaagcgcagttagcagtcttagcatttaactgtggtgcgttgtacgacgatttacaagcggtggaacagttgaaattagttggtcaactaagtgagaatacttggcgcggcaatacgacgttgcaattgatgctgaaagatttacaaacgagtgggcaagtgttaatcgatcaacggagtaatcggttgacgcaacagttgtttaaagctagtggcacctatgtctttttcaatgagaagcatctggcacagctacaaagttatatcccagccggcagccaagccatcttagcagccgatgtcgcacagcaagcagaattgattgtggttgatgaaccaactgatttagatgaatttgaagccttttatcgccaacaacaggccactaaaatcagctttatcttctatagtaagtattcggcatatcttgatggtattcctgataagaaacagtttgcgactttcttggtttacctacgtcaacatccaggaattgaaaaagcacggttaggggaattagcgacttatctaaaaattaaattgccgctattaatttttatgttgcaggtgttttttgacttaggatttgttaaaatagaatgtggtctcatttcggccgcggaacaaccggaaaagcacgcattagaaagtgcaccgagttatcaacaacgattagctaaaattgacatggaaaagcagcttgtttactcaaccttcgcggagatgaaagactggctggcaggattcaatcagtagcaaactgttgaaagagttaaggagcgaatttaaaatggcaatcaactttaaagattacgttgcaagtgtgcccaacttccctgaagaaggtgtcacattccgtgacatctcacctttgatgtctgatggtgaagcatatgcagcagcaaccgacaagatcgtcgaatacgcaaagagtaaaggggtcgaaatgatcgttggccctgaagcccgcggattcatcgtcggctgcccagtagcttacaaattaggcgttggttttgcaccagcccgtaaaaaggggaagttaccacgcgaaaccgtctcagcaagttacggcttggaatacggcgaatcaacattatacatgcacaaagacgcggtcaaacccggtcaaaaagtgttggtcacagatgatttactcgcaacaggcggcacaatcgccgcaaccatcaaaatggttgaagaattaggtgggattgttgtcggaacagcctttttaatcgaactaaacgatttaaacggtcgcgaaaaaattaaagactacgatatcttcaaattaatggattattaatggatgtctttctaagctgggagagtctgatcattaacttaggttggtgaataaccgatgcaatcgggttgtttgcgggacgtggctagacggaagaaattgcatcagaaagcacgttaagaaaaaatgtaacgtcagtcagtcgctaaacgtaaggacctggctgaaggaacatgctaaaaaaggattcgccataacggcgaatccttttttgatagctacattctgtcgcggtataggccaacgaccttacctaagatgctaacttcattcaaaataataggttcaaatgtatcgttttctggttgtagccgataatgatcaggttccttgaagaatcgtttgcaagttgcttcatcttcagcagtcattgcaatcacgatgtcaccgttatcggcagtcgcttgtttacgaacgatcacttcatcgccgtctaaaattccggcactaatcatactttcgccgcgaatcgtcaacatgaacaaatcttgttcagtttgtagacttggtggaatcgggaaataatcggtcgcttcttcaaccgctaaaatgggcaccccagctgtaacaacaccgagaaccggaatcttcttctgtgatgcgccaattgctgtcaaaccagctgctgttaattcaatggcacgtggtttagtcggatctttttgtaaaaagccttttttctcaaggcgtgctaaatggccatgaacggtagaagtagaggataaattaacggcttcgcaaatttcacgaaccgttggcggataacctttatcttgaacgcggtcatggataaaacgcaagacctctaattgcttggattctgttctcgtcataagagcacctcatttgttctaatagctatatgttagcatacctatagcgggatttcaaacaagcgttcgtgttttttgacattttacggattttagtccaaaatagacaaatagtttgaattggagggcaacaagatggcaatggatcaaaaacgattagaccgaattaatgaattagcacacaaagcaaaagctgaaggactaactgaagctgaaacagcagaacgtcaaacactgcgcgatgcctatttaaaggatttccgcgaaagtttccgctcacaagttgagatgctacaagtgtatgacaaagaaggtaaggaagtcactcctgaaaaagtgaaggatatccaacgggaaaaaggcttgcgtgacgattaatcttagaattccgctttctttttaggttaattatgtgtaaactatttaagtgaactgaattaggaaggggtgcataagatatgggattaggcattttattatttgtcattggggctttattaggcgcagtcgctggtttctttggcgcacgtgcttacatgaagaagtatttccaagacaatccaccaattaacgaagaaatgttaaaggctatgatgatgcaaatgggtcaaaaaccatctgaaaagaaattaaatcagatgatgagctcaatgaaagcacaacaaaaacgtagcaacaaaaaataaaacagtcaagtcggttttaaaagggtttctaacgaacaagtcgtttgttagaagctctttttttatcataataagaacggaaatacaaatgattgtccggcttaattaagattgttataataggacttatcgaattttagaggataggagcacaacatgggaatttttaaaaaactagggtggtattttaaacaagaataccgccgctatttatggggcgtcatctttttagtcctcgtggcgattgtccaaattgtgccaccaaaagtgattgggaccctggttgatttaatggatgccaaacaattaacggcccaaaaattaatcatgtggctcggcgtcttgttaagcgcagcgattttacaatatatttttcgctatggttggcggacccggatttggggtggcgcggctaaactggaacggacattgcggagtcgattgttctggcatttcatgaagatggacacgaccttcttccaaaaacatcggacaggtgacttgatggcacatgccacgaatgatttaaccgcgattcaacaagtggctggtgccggtattttaacctttgccgattcaatcatcactggtgggacaacgattattgcgatggtgattttcgttgactggcgcttaacgttgatggccttgattccaatgcccttgttggccgttgcgtcacgacggttaggtgcacatttacacacagcgtttgggcaatcacaggcggctttttcacggttgaatgataaaacccaagagagtgtctctgggattaaagtcttaaaaacgtttggccaagaagaagctgatattaaagatttcaacgagattgtcacgaagacaattgcgattaataaacgtgtgaatatgattgatggtttatttgatcccgccatcagtttgattatcgggttaacgtacattgtaacaatcatttatggcgggacgttggttatgaatcacagcatttcgattggtcaattgatttcgttcattagttatatcgcggcgcttgtttggccaatgtttgcgattgggcgcttgttcaacgtcttggaacggggcaatgcgagttatgatcgggttgatcaacttttgaaagaaaccagcaccattgtcgaagcaccggatgcgattcaaacactagcaactggcgatattcattatgctgttcaaaaatttacgtaccctggcgaaaaacaaccaacgctcaaacaggtggcgttcactctgccacaaggtaaaacgttgggcattgtcggaaaagttggttcgggtaaaaccacactgattaaattattattgcgtgaatatgatcagtatcaaggcgagattcaaattgatggtcacgatatccgggattattcgctggatgcgttacttgatagtatcggctatgtgccacaagataatttcttattttcaacggatgtccgcgacaatattcggtttgctgattttgaccgaaatcaagcggcggttgaagatgccgcgatttcgagtgcggtgcatgatgatattttaacgtttgtccaaggttatgaaacggtcgttggtgaacgcggtgtgtcgttatctggtgggcaaaaacaacgaattgcgattgcgcgagcgattatgactgatccagaaattctgatcttagatgattcgctatcagccgttgatgcaaagactgaagaagcgattttaatgaatttgaaaacgatgcgggctgatcaaaccaccattatcactgctaatcgcttgagtagtgtgatgcacgccgatgaaatcattgtcatggatgacggtcaaatcactgaacgtgggacacacgaagcactccttgccgcagatggctggtacgcagagatgtggttgaagcaacaattaagtcaagccttaggaggtgcataagatggccaagcaatatcaatcagaatggtccaagaaagttccattgaaagagcaattgcacatcatgaaacgcctctttggttatacgaaacgctataaacgccaatttatcggcgcaattgtggccgccgcaggtttagcgaccatcaatattttattaccacgattactacaagtctttatggatcgttacttaaccaatcagagtgcgaccacccaagttttaatgggggttgcggcgttgtacggtttaggcgtgattctcaaagccattacacaatttttccaatctttcctttttggaatgggttcggaacgcgcgatggaagatgtccggcgcgatttatttcagaagctccatcaactcgggatgcgttatttcgatcagacgccagcaggctcgattgtatcgcgggtcacgaatgatacgatgactttgattgattattggaatgttttcttatccttgttagtcggttcattttcaatcatttcagcgttcattgcgatgtggttaatttcaccaaaaattgcccttgcaacggcagcgtttctaccaatattgttaattgttatctggtattacagtagttacagtgcgcgggtttaccggcatatgcgtgaaaaattgagtcagttgaatacgaaactcaacgaatcaatcgaagggattacgattatccaacaattccgccaggaaaaacggttgaccgacgaattcgaacaagttaacgcggactatttaaaaacgcgcgaagcgatgattcgaacgaactcgttgttgctcgcaccaattgtgaatttactctatacactggcattggtcgttgtcttgagcttgtttggtgtctcagccctgcatagctttgtcacggcgggtttggtttatgcgttcacaacctatgttgggaacttctttaatccgatgaccaatatgatggattctttatcatcattacaagatggaatggtcgctggtcgccgaattttcagaattctcgatcaagaagaatatgcgccagctcaaaatgccgatgctgcaaatgaaattactgagggtcgcgtcgaattcaagcatgtttcgttttcatacgatgggaaaaatgaaattttgcatgacatctcatttgttgttgaacctggacaaactgtcgccttagttgggcataccggttctgggaaaagttcaattattaatgtcatgatgcggttctatgaattttatgaaggtcagattctaatcgacggacatgatattcggagttttcagacagcagaactgcgccgcaagatggggcttgttctacaagatgcattcatgttttatggtgatgtcgcatcaaatattcgattatttaatcaagagattacagatgcccaaattcgcgcagcggctgaattcgtgcaagctgatgactttatcgaacaattatctggtcaatatcatgctcgtgtaattgaaggtggcgcccaattttcaagtggacaacgccaattaatttcgtttgcgcgaacattggttacaaatcctaaaatcttggtcttggacgaagcgacggctaatatcgatacggaaacggaatcgatgattcaaactggtctcgctcggttacgtcaaggacgtacaagtattgccatcgcgcaccgtctatcgacgattcgcgatgctgaattaatcttggttttagatcaagggcagattgtcgaacggggtaatcatgatagcttagtggctcaaaaaggacgttattatgaaatgtatcaactccaaaatggtggcagtgaagaataagcagtttcaaaaaaacacgactattattattgcggagtaaatcgggaggaatttagcacatgaagaaaagacgctggctgaaatggtcgttaattagcgttgttgtcttagtggtggtagcactatttggtgccactatgtatatgtatcaatacgcatttgtaccggggcaaaaatcatttttaaatggtggtaagccaacgaaagtctatcaagacaatcaacgttggttaaaaaatgttaaacaatcaaagtggcatcaacaatctgccacagatgatttaaaattggcggcaatttatgtgccagcaacaaaacctacgaacaaaacaattttagttgcgcacggctatatgggtaaaaaagaggatatggcacgctatattcacatgtatcacgatcttggctacaacgttctcgcgccggatgaccgtgcagcaggtgaatcggaaggcgatgccattggctatggttggacggatcgcttggattacgtcaagtgggcccaacaaattgtcgctaccaacggacaggatagtcaaattgcccttttcggggtcagcatgggtggcgcgaccgtcatgtttaccgcgggtgaagaattacctaagcaggtgaaagcggtgattgaagattgtgggtataatagcatcgctgacgaactcgcataccaactaaacgatctctttggattgccgaaattcccgttattttacacaacgaattggatggcacgggttcgcgccggctataactttaatgatggcgatactgctaagagtttagctaactcgaaattgccaatcttcatgatccatggcgatcaagataaatttgtaccaaccaaaatggtgtatacaaattacaaagcggcgcatgcacctaaacaactctgggtggtttcgggggcagctcatggtgaagccttggctacagatccaacaacctatcgtaataaagttgcgcaatttttaaatgaatatcttcaataagtctgtttaattgtattttgaagtcgatttggtatgatagatatataaatatattgatatcgctaatccgttaggtgaggctcctatatgaacaaacgctgctactcagaaacatcgagagatgccaattgagtcaacagaaactgccctgaaggctttttctaatgtagctgaacaaagttctacgtcatatagtgctaaagctcaacgattggaatggcttgtttttcttgtgaggcatcctttctttgaggatgccttttttatgcggatcagctgcgaatgagagggattacgatggctaagacaattaaaatgacactcaatcagattaatcaattaacgccaaaagcgagtttagaacatttcgaaactgacaagaaggggttatcacggcagcaacgaacagcacggttacaaacctatggggaaaatacgattcaaaagcggcaacagcgttcgttattgcgagctagttggcagagcgtgcaagatccgtttatcggcgtattagctgtcttaatgatcatctcctggctcagtcgagatattgatggcgcgatagttatgttaatcatgattgttgtgtctagtagcattcgattcgtgcaagagcgcaagtccgagcaagcgagcattgctttacaagcgatgttggcaaagaccagccgggttgtaattgagggtcaaccaactgaagttgccgcacaaagtctggtacctggggatattgtgcagctgcagacgggggatttggtgaatgctgatttaaaaattctggcgagccatgatttacaaattaatcaatcttctttgacgggtgaatcaaaacccgtgagcaaacgcataacagcgcaagcaactgacgtaacgaatgcggcggatatggcgagtttattgctgatgggcagcaccgttgtcaatgggcaagctaccgcgttagtgattgccacgggtcaagcgacttgctttagcgcaattgtgactactgaacctaagtcgcgaccgaatcaatttaatgcagggttaaaacacatcagttggttattaattcgcatgatgctcgttttggtgccctttgtatttgtgattaatggtgtgactaagggagattggcaacagtcgtttttctttgcgattgcagtggcagttggtttgacaccggagatgttaccgatgatcgtcaatagtaatctggcgaaaggcagtgtcgttttaagtcaacaacaggtcatcgtaaagcagttaaaggccattcagaatctcggggcgatgtcggttttatgtacggataaaacggggacgttgacggaagatcatattaaattgatgtactatgcagatattttaggaaagcgggatgtgcaagttttgcgattagcatatttgaacgccaagggtcaatccggctggcagaaccttctggatgaagcgattattcattactatgaacaagaccaaaccaatgatgactttccatattaaaaattgggcgagattccatttaatttcgagcggcggcggctaacggtctggctcaaaaaccatgcaggtaatcaattagtgccaaaaggggcctttgaagaagtgctagcaacgtgttcccaagtcaggttagcggatcagattgagccgttgactgaagtgcaaaagcagaacctagtggcagtgcatgatcgtttggcacaacaagggatgcggatgctggcggttgcttatcaagatgacttagcagagacggcatcaattgaccacgttggtaatcaaggtttgattttcgacggctttttgggctttttggacccaccaaaacaatcagctatctcggcaattcaacaactacaagctcatcaagtggcggtcaaaattttaacgggtgacagtgctttaacgacgcagcaagttgcccaaaaagtgggcattcagaatctagctgtgaccactggtgagatgttagagacgttaacggatgcacaagtcagtgagctattaaccgagcaagcattatttgccaaattggctccacttcaaaaagcgcgtttaatccgtttattacaagcacaaggggaagtcgtcggtttcataggcgatggcattaatgatacgacagctttgaaacaagcagatgtcgggatttcagttgataatgccgcagacctcacaaaggatgctagcgatgtaatcctactggaaaaagatttgaatgttttagaacacggggtgcttgaaggacggagagtctttatcaatatgtataagtacattcggattacgttagcttctaatctaggaaatgttttgagcgtgctggttgccagcatctgtttaccatttttaccaatgttgtcactgcaaattcttgtccagaatttactgtatgatgtcgcacaactctggttaccttgggattgggttgctgaagatcaattgcgccaaccaacacagtgggcaactaaaggcttactgaagagtgcgtttattctaggaccgttgagctcaatggttgatattttaacgtttgcgattctctggtttggatttggcctgcaaacatcagctcaacagggggctttctaagcgagttggttcgtcgttggtttattgacgcagatgctagtagtttatgtattacggacaccagcatcaccgtccaaggatcgcgcaaattggcgtgtttacttggggagtttaatcagtttgttaattggaggtattctggtattgacaccgctcagacaagccgttgatttccaagcgattccaacacaatttggctggattgcagtggcattagttacggcctatctattggtgacgaatgcggttaagaatttaacgcgctaaaaaaactgctagatgatatcatctagcagttttttgttattattttttatcaggtagttcatatttaaaatcagggttaatttcgtggtcaatttgatcaaatgcggcttgcatttgatgattgacaacttctaagttctcttcgttgagttttaatttcggatcgattgggattggttcaccaaaacgaatcgtaatctttttccgttttaaaacatcagagaattttaatggcccttggtagactgctggtacgagtgggacccgcgccatcttggcaattacgaccgcgccgcctttaagttcgcttgaatagcggctaccagtggggaacatgattaacgaaagttcttttgagcgaagggcttttactggcgttttaatcgccgatgggccaggatttgttcggttcacaggaaatgcgtttgcgtgggttaagatgaagcgtaaaattgggtttttaaagagttcttctttagccatgaacgtgaactttcggggactagcagcaagtgcgaagaagattggatcccaccaagtccggtgcgggccaactaaaacataagtcccttcgggcagggcttctttattttcgaccttcaaattgccattcaataaccaggctaaaatgcggacgataaaacgtgcaaatgagaaaaacatagtttagattcctttcaaacgtgactagtatctgctcattataccaaataatgatactctttgttataatatgcctaaatacaaatgaggttgaaggtagaacgatgttaaaagcagatgagcgaattgaccaattatttcgcttagatattcagattattcaaagcccatccgtcttttcctattcgatggatgcggtgttgttagccgactttgcccagttaccaaaacgcgggacgattgtcgatttgtgcgcaggcaatggggcggttggattattcatgagtcccaaaacaaatggtcaaattatcggtgttgaacttcaagaacggttggccgacatggcacaacggtcaattgaattaaatgacttaaccgaccaggtgacaatgctcaatatggatttgaaagacgttaacactaagattcataaggacagcgtcgatattgtgacctgtaatccaccatattttaaggttgaacccaatagtcaaaaaaatcccaatcaacatctggcactggcgcggcatgagattgcaacggacttacgcactgtggttcaaaccatgagtggcctgttaaagatgaatggtaaagggtatttagtccaccgtcccgaacggttcttagaaatctgtgacgaactacgcgccgcacgcatggaacccaaacgcgtccggtttgtttatcccaaagcaggcaaagaagcgaatatggtgttaattgaagcggtcaaagatggtaaaaaagggggcttacgaatgcttccggaactgacgatttatgaccaagacagccactatacaccagagatgcgcacgaagttattcatggctgacaatgactgagaaggcttattatttttacgtattagtctgcgccgatcatagtttttatggggggttcacgaccgacgttaccaaacgcgttgccacgcacaatgctggcaaaggtgcgaagtacacaaaattgcgccgaccagtgcggttattatattttgaaacgtttagtgataaatcggcggcgcttaaagcagagtatgcgttcaaacatcaaccccgccgcaaaaaagaacaatatttaatggaacatggcatttcaagaactcaattttagaatggagagaccaatatgcaacctaagttagttgtcgatcaacacattcatttacaacctgtgacggaagcggatgcgccggcgttatttcagttagtggatcaaaatcgcgtcaatctcgatacttggttaccatgggtgggcgatatcgaatcagtggccgatgaacttggctttttaaaatatgcgcaacaacaaatggcaaaccaggaactttggatggcaacgatttgggatgaccaccagttagttggtacgattgatgttcacaatattgacgacttggatcgtgcgggtgaagttggctattggttagatgaagctttccgcggacgaggtgtcatgcatcgcgcactagccgccattgaacaatacgcggccagtgaattggaacttgaccagttgagtatcattgctgcacacgaaaacgtggcgagtcagcaagtcgcgctaaaagcgggctatcgagcggttgaaacagtgagtggcgttacctcagtgagccaccaaccacaagatgcaacccgttatcagaaacaattgggcggcatgtaagttcttgttgacgcgccttgttatttttagtatacttttaaacggtatttcaataccaaaaaataattcacactggttgatttctagagaggtgcttggcgacaagttctctaaaaaagtgaaaccagtggtcgaaaaaaaccatatggaggtctgttgacatggctgtattgtcaatgaaacaattattagaagcgggtgttcacttcggtcaccaaacacgtcgttggaacccaaaaatgaagaaatttatctttactgaaagaaatggtatctacatcatcgacttgcaaaagacagttcgcatggttgacgatgcttatgacttcgttaaagaagaagctgctaacgaaggtgtattcttattcgttggtactaagaaacaagcacaagatgcaattgctgaagaatcagtacgtgcaggccaatactttgtaaaccaccgttggttaggtgggactttgactaactgggacacaatccaaaaacggatcaaacgtcttaaagaaatcaaagcaatggacgaagatggtacattcgatcgtttacctaagaaagaagttgccttgttgaagaaacaacaagaaaaacttgaaaaattcttaggcggtatcgaagatatgcctcgcatcccagacgtaatgttcgttgttgatcctcgtaaagaacgcattgctatcaaggaagcacaaaaattaaatatcccagtcgttgctatggttgatactaactcagatcctgatgatattgatgttattatcccatcaaacgatgacgctatccgcgctgttcgtttaatcacagctaaaatggctgatgctatcatcgaaggccgtcaaggtgaagatgatgttgaagaagctacatttgctgcagaaaacaaatcagcagactcaatggaagaaatcgttgaagcagttgaaggcgacaacgatactaacactgacgctaaatagtagattcaaataagctgtcttagaggtttcgcaaatactgcctgacttgtgggacagctttttttaaaccaattatattgaatataaattgtcggaggtatgaattatggctgaaattaaagctgctcaagtaatggaattacgtaagaaaactggcgttgggatcatggacgctaaaaaagcccttgtagaaagtaacggcgacgttgctcaagcaatcgatgctttacgtgaaaaagggatggcaaaggctgctaagaagagcgaccgcattgctgctgaaggtttagcaggcatcgccatcgatggtaacactgctgcaatcgttgaagtgaactcagaaactgacttcgttgcttcaaacgatcaattcaaagctttattgaaagatattgctgaaacaatcgctaaaaacaaaccagctgacatggcagctgcagaagcattaccaatgggcgaaggcacaattgctagctcagtaatcaacttaactgctgttatcggcgaaaagatcagcttccgtcgtttcgaattagttgaaaaaaatgatggcgatcactttggcgcatacctacacaatggtggccaaatcgcttcattagttactttagaaggtgctgacgatgaagcagctcatgacgttgcaatgcacgtttcagctgttaaccctcaatacgtttctcgtgaagatgttcctgctgaaacattggctcacgaacgtgaagtattaactgaagaaacaaagaacgaaggcaaaccagaaaacatcattcctaagatcgttgaaggccgtgttaacaagttcttgtcagaaatcagcttgaacgaccaagctttcatcaaagactcagatcaaactgttgcacaatttgttgcatctaagaacggtagcgttaaaggtttcgttcgtttcacagttggtgaagggatcgagaaaaaagaaaataactttgttgatgaagtcatgggccaaatcaaataagcttattttgcttcaaaaagggaacgcaatttgcgctccttttttttgcagttttacgataattcagaatcgcatacccaaataacttattaaatatggtaaaatgagcctagtaatcaacggagggatatcaatcatgtcaaatacaaaatacaaacgcatcgtcttaaaagtgagtggtgaagcacttgctggcgaccaaggtttcggaattaaccctgaaattgttaaagtagtcgcaaacgaaatcaaatcagttcacgatttaggggttcaaattgccattgtctgtggcggtgggaacatctggcgtggtgtgactggtgaacaaatgggcatggaacgtgcgcaagccgattatatgggcatgatggcaacggtcatgaatgctttagctttacaagataacttagagagcattggtgtcccaacgcgtgtgcaaacatcaattgaaatgcgtcaaatcgcagaaccttatatccgtcggaaggctgttcgtcatttagaaaaaggccgcgttgtgatttttgctggtgggacagggaacccttacttctcaacagatacaacggctgcattacgagctgctgaaattgatgcagatgtgatcttgatggctaagaacaacgttgatggtgtttactctgctgatcctaacactgattcaagtgccgttaaattcgacacattaacacatttagatattatcaacaaaggcttgcaagtgatggattcaactgcaagtactttatcaatggacaatgatatcccattggtagtcttcaacttaaacgaaccaaacaatatcaaaaaagttgttgaaggtgccaacatcgggacaacgatcgaaggaggagaataatatggcaaatccaattttagatgaagcaaaagcaagcatggaaaaagcagaagcttcattacaaagaacattaggccaaattcgtgctggtcgcgcgaatgcaagcttggtcaaccgcgtgaatgttgagtattacggtgcaatgacaccacttaaccaaatcgccgcaattacagtcccagaagcacgggtcttgttgattaccccttatgacaagggtgcgcttgaagatatcgaaaaagctctttatacagctgatttagggatttcaccagccaacgatggctcagtaatccgtttagtaattccacaattaactggtgaacgtcggaaggaaattgctaaagaagttggtaaagaagctgaaatcggcaaagttgccatcagaaatgcacgtcgtgatgcaatggacagcttgaaaaaagctgaaaaagcaagcgagattagtgaagatgaaatgcatgatttagaagaacaagttcaaaaattgacgaatgaagcaacgaagaagattgacgaaatcgccaagaacaaagaaaaagaaatcacagaaggttaatccctaatggatgcaaaaagccccgccacaacagtggcggggctttttttgcgttaatgaataattttactcttcgtcgcttctttgtggagtttttcaaagaatggattgattcgatctttcaggaagaggccaattaggaagaaaacaaccgcaaagagcgctaggatgataaagttatgccagaggttcggtgcgtaaatcccaccagttggttcgcgtaagaggttgaccccgtatttgaacggtaaaatggggttaataaactggaagaattgatcggagaggacaactgggaagttcccgccaccgccagagatggaaagcaccaagacaatcatcgcaattcctttaccaacgttcccgaacatcgcggcgagaacgtaaacaattgtcatgaagaccatgctcaggaagacggctaataagattagcggtagtttatcaacgatgtaggccttcaataagaaaatattaccaagcgtcacaatcacggcttgggcgataccaatgacgatgtaggttagccagcgagcaataaattgctgtttcttagtgtactgattcttttgtttgtcgtctaacgcgaagttggttaagacgatgttactcaaaagaagtgcaccaacccagagacaaagggctgtgtagaacggcgcacttgctgagccataggtcttaatcgggtagacgtgtttttctttcagttcaaccggtttggctaagaaattactttccttagttgcatcgcggcgaagcaatttaatcagatctttgagatcgaccgtcttttgttgtttgcgaatcgcctcagcgcctttttggatcccgctacgtaagaatggccaatcattgttgatgaggttggtcgcatcatttaaggcggttttaacgagtgggaatttctcgttggccatgttgagcgtcgttgttaagtcgttttcgatgcctggtaagtcattgttgatgaaactggttgccagttgcagtttatttttgagtagtgggtaatcattctggtaaacgtcagaagcggtgtttaatccagagataatcgtgcccatattgccatttaataatgtattcgcgtcatgaatttcttgtttcaacgctggtaactgctgagcatatttttgcagatagtcgatggcttgttggagcgtcttttgtgtgttgaataagagtgcggggagtttcggtaaaacttcgccgttaagctgtgttaagacggcattaccgctagcaattaatgttgaaaagcggtcgagcatatttttgacgctgtcaccgatatgggccgcttgaatcttagcgacgctgtcttcgacttggtcggcgtattgaatcaaaccattaatcttggtttgcaaatcgtcaattgataaatcatcgtaatgggcgagaaggtcatcaacttggcctttaaaaacgccgagttgggtcgccaacgtatttaaatgtttaatcggtgtatcaagtgcatgtgattccggttgaccattcgccactgctgactgattgtagctgtcttgcaagttttggagggttgtcgcaagttgagtcgcatgggtttgcaaggtagcggtgtgatcagataagttctggagcgcttctttgagcgcttgcttgagttcagcattattgggatcctctttgagttgactcagcaaactattgacggccgttaaattagttgaaatgttagttgccaattgattggtaatggctaacccttgatccaccgttttttgaatgaccggtaaagcagcttggagtttagggattaagtctgattgtaattgacccgcgacaccttgggccgtttggctaaaagtcattaagtccggtaagactttttgtgttttgtttaacacatctaaaccagtttgagcttcgttaatgccgttcgttaaagtattggcgatgccatcgaaatcagaatcgagtgtggcaacttgtttgccagcactttggatttctggaatcttagcctgaactttcgttgcgagctgaccggctgcttcaacttgtggtaagtattgattgatgccgactactttttgcgccatggcatttgcttgtggtaaaaaggccgcgaactcgttggcttgggcaagctttaattccatttccggtagtttcttttgtagattaagcacttgttctgcgtattggttaatttctggaatttgttggtctgttttgagaatgaggctcgagaaacgattaatgacggggagatttgtatcgagatcaatcccggccttgtttagggtactcatcaatgttttaccaacggttgagacgaattcttctgaaatggtggactgaagcgtagttgcacccgcgctggtaattttaggcgcaatcgcgttaatcttatcattagatgagtagactatctttggcttttgaatcttgccatcgacgaaactaacgagatcctttgagaagtttttgggcacgtaaatcccggcgtagtatttccccgtttttacgccgtcatctaattcttttttgctcgaagtaaattgccagcctaatttgtcgtttttctttaattggctaattagttcggcgccaatctcgacttttttgtcagcaatgacaacactttgatcggctgagtaaacagcgacttttaagtcttgcgttttactataagggtcccataacgcccagatattaaaccacgcgtagagcgatggaatgataatgagggcaataattaatagaagagcgatcgggctttttaagattcgacgccaatcaagtcgaaagagttcgaaggtttttcgcataataaactccctttttctgtttaaggtatgtattagtttatcatatttaacctgttacatgccaataactataggaatctactaatatttaacaataaatttcaatgtgatagcggcaacagtacgttgtggcgggaatcgttggtattaaaggcttaatcgtggataaaaatcatctgggaagaactcaaaaagtgcagaatgggcggttcagtttgtacaatgccggtgacaatcggttgattttaaatagtcacttcctgtgatttttggtacaatcatatgagagttattgaaactggaggagtatgtggtgtttacaaataaaaaaacagacgcacaacaactagatcccaccaatatccccaaccacgttgccatcatcatggatggtaacggtcggtgggcgaagaaacgcttaatgccaagaatcgctgggcataaagcaggaatggaaaacgttaagacgattaccaaaacggccagtcgaatgggtgttaaagtcttaacgttgtacgctttttcaactgaaaactggaagcgtccaaatgacgaagtgaacttcttgatgcagttaccggtcgatttttttgatacgttcatgccggaattgattgctgaaaacgtccgtgtgaaagtcatgggtaatattcaagaattaccagaaaagacgcaaaaagcggctaacaatgcgatggccgatacggctgataacacagggatgattttgaactttgcactcaattatgggtcgcgtgacgaaatccaacaagcggttaagcagattgctaaagatgcggtaaatggtacaattgaggtcgatgcaatcgacgatgcgttgattagtgattacttgatgactggctttttaggggaatatactgacccagaattattgattcggacgagtggcgaagagcgaatttcgaacttcttactctggcaaattgcttacagcgaacttgttttcgtagatgaattctggccagactttaccccagcagtgtttgaacgctcaatcggcgcttaccaaaaacgtaatcgtcgttttggcggtcttaaataggaggaaatacaattatgaaacaacgtgtcattacagcaacaattgctttaatcatctttatccccatcattttctttggtggtatttacattgatatcgcggcagccgttttagcactcgttgccttatcagaagttttcatcatgcgtaaacgaattattgtctcacctgatgcaaccatcgccggactagcggtgttaagtttagcctcacccaaaggcgcctttaactggttaccagcaggtgtgtcacaatttgatttattctacttcttcgttgccattttattagccatcacagtcttcacgaaaaaccgggttaacttcgatgatatgggtgtcacaaccttagccagtctctatatcggcttaggcttccattatttagccgcaacgcgaaatattggtggttttgacactgtgatgtatatcttattggtcatctggatgacagatatcggtgcctacacattcggacggatgtttggtaagaataaaatgtggccagctatcagccccaataaaacttgggaaggttcaattggcgggacattatcagcattagtggtcgcagctatttatttaaacttcttcccacaagcttattcaatgcctgtcatgttaggtttaacgttgatcttctcaattgccggtcaattaggcgatttagtcgaatcagcttacaaacgctattatggcgttaaagactcaggtaaaatcttaccaggtcacggcggcatcttagatcgctttgacagcatgttgtttgtcttaccgctactacacttgtttggcatgatttagagtgcgtttgtggcggttagcaactgagcattaatacaaaaattcgaataatcccggttttaggattgtttgaatttttagattaagcggaagttgttgcaaccaaaaagcacgtttttaaaagtcaatattatctagcgtttagcgcaactttttggtttgcgctaaacgcttttcttgtttctaaggaattcgtgatataatataacagttcatatcaaatgagagtattgaaatacgcatttagaagggagtcgtactctattggcggcgattattgcgtttattatcatatttggcattttagtagtggtgcatgaatttggccacttttacatggcgaaacgttctggtattttggtgcgtgaattttcaattggcatggggccaaaattatttgcaacgcgcaaaaatggcacgacttatacgattcgttggttaccacttggcggctatgtccgcatggcggggatggcggatgatgaatctgaaatcgaagccggcacgcaagcaaccttgctgttagacgaacaagaaactgttcaaaaaattaatacaagtgacaaagtaaccacgttaaacggtgtcccatttcaaattgcaaaaactgacttgcaaaaagaattatggattgaaggctatgaaagtggtgacgaatccgaattaaagcgttattcggtcagtcacgatgcaacgattgttgaatcagacggaacggaagtgcaaatcgcacccgtggatgttcaattccagtcggctagtttaatcaatcggatgttgaccaactttgcaggaccgttcaacaactttatccttgcgattgtggcgtttgcgctctttgcttttttaaacggtggcgtcccacaaaacaaagcgattgttggcacagtgatgccaaactcgccagcacaaaaagccgggcttaaaatggatgaccggttagtgaaagttgctggcaaaaaagtcacgacgtttactgatttcagctcggtgattgcaaaatatccgaataaaccagtgaatgtccaggttaaacgggcaaagcaaactaagtcactcgaaatcacacctaaagcggtgaaagtcgaggggcaaaaggggaaagtcggccaaattggtgtgacagctggactcaaccatagcgtgggggctaagttgaaatatggcttcacccaatcatgggcgaatgcgacccagatttttaaaattctcgggtcattcttaacgggtggtttttcactcaataaactagccggaccagtcggcatgtattcaatgacgacgcaattcgcgagtcaaggctttacaatgctcgtctacttcttagcgttcttatccgtcaacttggggattatgaacctgattccaattccagccctcgatggtggtaagctcgtgatcaacgtgattgaagcgattcgcggtaaacccatctcaccggaaaaagaaggcattgtcacccttgtcggggtcggcatcatggtcgtcttaatggtcttggttacatggaacgatattcaacgctttttcttttagattatttttggaggcataacagattatgaaacagtcaaaattatttatcccaactttaaaggaagtgcctaactcggccgaggctaagagccatcggatgatgttacgggccggctatattcaccaagtatctgctggtgtttacagttacttacctttagcattccgcgtcttggaaaacatccaagccatcatcaaagatgaaatgagcaagattgacgccgttcaaatgcaaatgccagggattttacctgctgaattgtgggaagaatcaggtcgttacgaaacttatggcgataacttattcaagttcaaggaccgtcatggccgcgacttcatcttaggcccaacacacgaagaaactttcgctgacttggtgcgcaatgaaatcaaatcatacaaaaaattaccattaacgttatatcaaatccaaacgaagtatcgtgacgaagatcgtccacgttacggtttattacgcggccgtgaattcatcatgcaagatgcttattcattctcagccaatgaaactgatttggatacaactttccgccaaatgtaccaagcttacaccaacatttttgaacgctgtgggttagacttccgcgcaatcgttggggatgccggtgccatgggtggtaaggattcaatggaattttctgcgattgctgaaattggggaagatacgattgtttattcagaccaaagtgattatgctgccaaccttgaaatggcaacgagtgtccgtcctaagcaaaactcaagtgatgtgcaattagagcttgaaaaagtagcgactggcgatgcccacacaattgaagaagtggctgctaaattagacgtcccagcacaacaaatcatcaagagtgtcctctttatcgctgacgaccaaccggtcttggtcttagtgcgtggcgattttgaagttaatgatgtgaagttgaagaacttcttagatgctgatttcttagaaatggcaaccccagaacaagtcttagcaacaatgaacgcaccaatgggttcaatcggaccagttaacgcgccagaagacttacaaatcgttgctgattacagtgtcgaagccatggtgaatgccgtggttggggcgaatgaagccgatcaccatttcacgaatgtcaacagcaagcgcgactttaccgtagctgattattcagacctacgtttcgttcaagaaggcgaaacatcacctgatggtcaagggaacttgcactttacaaaggggattgaaattgggcatatcttcaaactaggcacacgttacactgaacaattcggtgccactttcttagatgaaaatggccgtgcgaaaccaattatcatgggttcttacggaatcggtgtgagtcgcctcttatcagcgattacggaacaacaagctgacgaaaacggcttagtttggccaagcgcgattgccccttatgacttgcatgtcgtaccggtcaatgtcaaagatgctgaccaagtcttattagctgaacagatcgaaaatttacttgaagaagcaggttactcagtcttagttgatgatcgtaaagaacgggctggcgttaagtttgccgacagtgacttaatcggcttaccaatccgcatcacagttggtaaaaaagcagcagaagaaatcgtcgaagttaaattacgtaagacgggtgaaaccctagaagtgaagaaggatgaattgattaattcattaagtatcctattggcttcagagacaacagaagctgaatagagtgcgttcaagctcggtcaacttttgagcattagcacagggaagcgaattaacgacgcagtcgataatttgattcccagcgctaagcgcagaaagttagcttgaaaagcacgtttaggaatagagtgcgtttgaaaccgtttggctccaagcattaacttaaattcgtgaatgagcgacaacgtcgatcgttcgcggattgtagttaagcgcaagaggcagtttcaaaaagcgcgtttacattataaatgttcggacatctaaaaagggctgagacagaatgatatttgtcctagccccttttatttaactttctgaatatgaggaggcccttttgtggcattagatcaaaccgcactgtttcaaaaattattagaacaaattaatttacccgcggatgttgcgaattatcctggcttcaaaactggccaagtagaacaagtcgttgtccacgaaacatccaaacggtggacgtttaaattacatttcgaatccgttttgccatatgctgtttacacaacgtttgaacagtatttagaagcagcattcaaagcgattgcgggcgtttcagtggaaattaccaccgatgcaactgaattggacggcggcgttttagcagcttattgggaatacgtcatcaaccatagtgggattcaatcttcaatgttgcacgaattgtgtgaaaaagagaccccctatatcgatggtcgcaacgtctttttagttgtcgaaaacgacatcgtgaagacgttcttcttaaatcaagcgcaaacgacaatccaagctggttatcaacggcttggttttcccaagtttgcgattcaacccttgattgacgaatccgcctcacaaaaggcaatcgaagattttcaagcaaagaaggctgaacaagatgcagcccgcgcacaagcggcagccgaagcgatcaagaaaaatgaagcacttaaagaaaaacgtcaatcagaaggtaaaccagtcgatggcccgatttcaatgggccgcggcttaaatcctgctgaaccaactcgtcagatgattacaatcaatgaagaagaacgttccgttgtcattgaagggttcgtctttgataaagaagtccgcgttttacgctctggccgccagctcttgattttgaagatgacagattactcatcatcatttacggtcaagaaattctcccgggataacggcgacgaaagtatcttcgcagccatcgataaaggcatgtggttcaaggtacgtgggagtgttcaagaagataacttcatgcgtgatctcgtggtcaacgccaatgatttggtggaagttagccatcccaaacgccaagataccgctgaaaatggcaagcgcgtcgaactgcacttgcacaccaatatgtcacaaatggatgcgaccaacaagattggcgactttgttcaacaagccgctaaatggggccaatccgcgattgcggtgaccgatcattataacttacaagctttcccagatgcttatgcagcgggtaagaaaaacggcgttaagattttgtacggtgtcgaagtcaatttagtcaatgatggcacgccagtcgcgtataacttgcgcgatgaagcgctcgaccatgctgaatacgtgattttcgatgtggaaacgaccggattatcggccgtttacgattcgattatcgaattggccgctgtcaaaatgaaagatggcgaagtgattggctcgttcgatgaatttattgatcccggtcacccgttatcagctttcacaacgcaattgacgagtatcaccaatgaaatggtgcacggtgctaagaaagaagccgaagtcctagcgttgttcaaagaattcgcgggcgacgccgtcttagctgggcataacgtaacgtttgatatgggctttatcaatgctggctatggtcgtaacgacctcggtcagattgaaaatcccgtcatcgatacgttggaagtttctcggatgcttcatccagaatacaaaaatcataaactcgatacgttaaccaagcggtataaaattaacttggaacaccatcatcgtgctaacgccgatgctgaatcaaccggttatttgttatacaaattagaagccgaagcggccgagatgtatgggatggtcaacgtcaatcaactgaatgatcgcgttgggattggcgatgcgtataaacaagcacggccagcgcatgcgattttaatggcgcaaacccaagctgggttgaagaacttatttaaactggtttcagcatcgatgaccgaatactattatcgcacgccgcgtttgccaaagagtcgcttggatgccttacgtgaaggtattctagtcggttcagcttgtgccagcggtgaagtcttcgaagcgatgatgcaaaaaggctaccaagaagcacgcgatcgcgcgaagtattacgattacctcgaagtaatgccaaaagccgtttacgcaccattattagaacgtgaactagttcgcgataatcgggcgcttgaagaaatcattcgcaacatggtcaaactcggtgctgaattggataaaccagtggttgcaactggggatacccattatttgaatccagaagattcaatctatcgtaagattttgattcactcaatgggtggggctaatccattgaaccggtcacaattaccggatgttcatttccgatcaaccgatgaaatgttgacagcgttcgattttcttggtgccgatattgcccaagaactcgtggtgacgaacccgaaccaaatcgccgatatgattgatgaaatcacaccggttaaagataagttgtacacgccgaagatggcgggtgccgaagatgaaattcaaaccttaacgatgaatcgtgcgcacgatttatatggggatgaactccccgaaatcgtgcaagcacgtctcgataaagaattaaagagtatcatcgggaacgggttctcggttatttacctgatttcgcaaaagctcgtgtataagagcggtaaggatgggtatttggttggttcccgggggtccgttgggtcgagtttagtcgcaacgatgaccgggattaccgaagttaatccattgccgccacattatcgctgtccaaattgtcactactccgaattttataccaaaggggaagtcggttcgggttacgatttagccgacaaagactgtcctgaatgtgggacaccccttgataaagatggccatgatattccatttgaaaccttccttgggttccatggggataaagtgcccgatatcgatttgaacttctccggtgattaccaaccggttgcgcataactacaccaaagtcttgttcggggaaaataacgtgttccgcgctgggacgatcgggacggttgctgataaaactgcctacggctatgtcaaagcctacgaacgtgataccgaacaaactttccgcggcgcagaagtcgatcgtcttgccaaaggctcaacaggcgttaaacgaacgacgggtcaacatccggccggaatcattgttgtgccggattacatggacatctatgatttcacaccaatccaattcccagctgacgatcaagatgcagcctggaagacaacccattttgatttccattcgatccatgataatatcttaaaactcgatatcctgggccatgatgatccgaccatgatccggatgctgcaagatttatcggggattgatcccaagacgattccaaccgatgatcctggtgtgatggccttgttctccggcactgattcactcggggtaacgccagaacagattaattcgaaaatgggcacgctcggtgtaccagaattcgggacgcggtttgtccgcggaatgctcgaagaaacgcaccccacgacgttctcagaattattgcaaatttctggtctttctcatgggaccgacgtgtggttgggtaatgccgaagaactgattaacaaaggcgttgttaccctaaaagacgttatcggttgtcgtgataacatcatgatggatttaattcactggggtatggatgatagtatgtcgtttaacatcatggaacgggttcgtaagggtaaagggattccggatgactggcaacaagccatgcgcgacaacgaaaatgtgccagactggtacattgattcctgcctaaaaattaagtacatgttccccaaggcccatgcgaccgcctatattttgatggcgttgcggattgcctacttcaaggtgtacttcccaattatctattactgtgcttacttcagtgtgcgtgccgaagatttcgacctcgtggccatggcccaaggtaaagaaggcgtcaaagcgcgcatgaaggaaatcaccgataaagggatggaagccagcaccaaggaaaagaatttgttgacggttctcgaaatcgccaacgaatgtttggaacgcgggattaacatcaagatggtcgacatcgaaaaatcagattcatctgacttcttgatccaagacgaccacaccttgcttgcgccattccgtgccgtcccaagtctgggcggtaacgtcgccaaacaaatcgtttccgcccgcgaagaaaagccattcttatctaaagaagacttatccaaccgtgggaaagtttccaagacactgatcgaatacctaacagaaaataacgtattgaatgacctgcctgatgaaaatcagttatcgttgtttgatatgatgtaaaaaagccttcatactttcactgaaaataaattttcggagaagtatgaaggctttttattttgcacacattttatgcaattttaaaaaattacataaaatttgttgaataaacttttgattcgacgtatactaagcatattaaataagtgttgaaggaggatttaatggagaaacttagtaagtttgttgaatttgtgagtggctctccacaatctcgtctatttgtttcaatgaatgaaagtgatcccagttattgtatttatgggcaatctgaattgaaagctgatttagttcagtcagaaacatcgtccaatgagggacgtcaaattcggacccctgataaagttatgattttatcagaaggcgatattatttttaatttagtttctggagaagcaagtgttgttggaaaaaagcatgttggctatctacaaactcaaaattttattaaattaatccctaatcaggatttggatactcactatttagttttcttgttgaatcaggatcacaatattaaaagacagcttgtaagttcattacaaggaacgatggttattaaatatacacttgcacagctaaaagcgttgagaattaataaactaccaccaatagatgagcaacgattaattggaagaatgtatttcaaccaaatacgattaaactggtttagaaagcaaagtgcggatttaaaactaaaaatagcaatgaatcagttgcgaaaggactagtgaatgaacgaattaaatttcgaatcagaattaattaaatatattacaagtgggacaataacagtttctgaggatgattttcaaaaaagtaatattcgtgaaacagcaaaagattatgttgtgaagactaagctgtggcagtatcgagacgatattagaacaactgaacaactatgggctaattttaagcagattttagagcagcataatcaaaatacactcgataatccgctaagtgtcatggaatttaatcaggtgaagaaaatcatttcagatttaaaaacaccgtatgatgctggtcaatttttatatgggttaaatggtgtctctcagattgaaattgatttagatgatggtcggcatgtgtttttaaccgtttttgatcagaaacaaattggcgctggtaatacagtctatcaagtcgtcaatcaaattgaacggccagcattactaactgggaagcaagaacggcggtttgacacaacattattaatcaatggcttaccaattattcaaattgaagagaaacgagattcacatgatgttaatgaagcacttaatcagatgcatcaatatattttagaaaatcaatacactgacattttttcaacattacagattctggtggcgattacgccgaataatgttaaatatatggccaatacaacagctgacaaatttaacaaagattttgcgtttaattggcaacggaaatcagataacaagattgtccgtaactggcgcgaatttgcggattcaatgctaagtattccaatggctcatcaaatggcaactaactttatgattttggatggtactaagaacaaacaaatgattaaagtgatgcgcccttatcaagtttatgcaacacaaaacgttattcaaaaacttaaaaaagttgattttgatatgggactaaacaaaattggctatatctggcatacaacgggttcgggtaagacaatcaccagttttaaaacagcatggcttgctagccgaatgccgggagtcgataaagttgttttcgttgttgaccgaattgctttaacaaagcaaacgaatgaaaattacaaagcgtatgatcctgatggtgcagtggatgatgatagtcgctctggcagtgtgcaagggacacagagtaccaacgacttaagccggaaattaaagagcaaggataacaatatcattgttacctcagtccaaaaactagaaacactggttaagcgtaagagttttaagtcacctgataaacacattgtctttattgttgatgaagcacaccggtcaactggcggggatgcttttgaattattgcaaaagagctttaaaaaatctgcatgggttggttatacgggtacacctatgtttgatgaaacaactaatgggttacgaactgaggatatttttggcgaattactgcatgcttataccattaaagaagctattgccgatcgaaacgtactaggctttaaagttgattttgagacgacgattgatacggaaagtatgaaaacacaatatttgccagacttctataaaaaacaacatcccgattgggaacagcgtcagattcaagataaaattgataatttatcgcaagaagacatggacgatgaaattgcgcctagtttctatgatgaaaatgaggaccatgttcgcttagttgtccaggatatttttaagaattggcgtaaccgttccaatgaaggtaagtacaatgcattatttacaacccatgttggtggtggtaaggcaagtaccccaatggctatgatgtactttaaagaatttcaaaaggtgaatgaagagcatgcaaagaacggcggccaactgctgaaagttgcaattacatttagtcaaaatacaacgaataaagatggcatggtcgaaaccaatcagaatttacatgatgcgatgaaggtttataatcatcaatttggaacaagttttgggttagatgacgtttctggctatacgcaagatgttacgagtcgccttaatcgaactgcaactgacaagaactacctagatttagtgattgtcgtggatcaattactaaccggatttgatgcgccagaaatgaataccttgtatgttgatcgtactttaaaaggggcaggtctaattcaagcgtactctcgaacaaatcgaatcgctgatatgaaagaaaaaccttggggccgagtggttaattatcggtggccgagccagaatgaaaaattaatgaataaagcattagccatttattccaacaaggattcagccactttatcagaaaaagaacagaaaaaggaaaacgtcgattctggtgttttagcgaaagattttaaaaacatggtgcaagaggttcgtgggattgtcggccaactggatgatttaacggatggttttaatcaattaccaccaagtgaacgccaaaaagacgagatgtttgaattattgcgacaatacaacgtcggtatgtcgaaacttaaacaatatacaccgcaagatggtgaagaagatagtggatttaactatgatacgccggacgatttaattcgtgctttagggatgacaccggcacaagaaaaggaattgaccactgttttaacgaatgaaataaaacaatacattagtgtgcgggataaagtgcctgttcagcaaattgagttaaagatgacgcacatcaaagatgttcaagtcaactacgattacttgacggaactcgttgaaaaactcttgaatgaaatgcatgaagaaaaaattgaggctgctcagaagacgaagaaggatattgatcaatttgcaaatggcttagaagaccaaaattatgcgcacaaaattaaaaacgcgacacaagcgatccttgatggctactatccacctaaagggatggcaatgatatatcctgtcaagttggacgatagtgagcaagttattcaagaagctaatcaaattagtattgatcggattttattagaatttcgaaaccagtgggggatcacagatgtgattacgagtgctgggttacgacaactatttagtacgcatcaatatggccaacaagatttagatgatgctggccaattgcgagatattattgctgaagcaagtttgagttataagaatttagcattagatgctgatatccaagcactttcgaaaatcaggtaccgaaacggattacgcgaagcaatttatttagcagctgataaacatgtaatacattaaaagatccgcaattaaaggagaacgaatctaatgagtgagataacaacattacaagacatcactaagaaattatgggcaatggctaatgaactacggggaaatatggacgctggtgaatttaagaattatatcttagcctttatgttttatcggtacctttcagaacatcaggaacaatatttagtttctaataatgtgattgatgttgccgatgggcagacaattaatcaagcttatgtcgaacaagcaacggcagatgaattagctgattatcttgaagatatttcgtcaagtttaggttatgcgattgcgccagctgatacgtggcaatcattaaatgaacgaattgaaaatagcacggttattccaagtgattatcaaacgatttttgataatttcaataaaaatgcggtcttaaatcaagaggctgctcaagatttcaacggggtctttaacgacattaatctcggtgattcgcgcttaggtagttcaacgacggcacgtgctaaatccttgaataatattgtcaaattagttgatgatatcgaatataagagtgatgaagataaagatattctaggtgaaatttatgaatacttaattggacaattcgcggccagtgccgggaaaaagggtggcgaattctatacaccccatcaagtcagcaagattcttgctaaactagtgacgatggatgttgcaccaagtaatacagcattctcagtatatgatccaaccatgggctccggatcattattgctaacagttcgtaatcaattacccgaaacaactcaagcaggagcgattaagttctacggacaagaattaaatacgacgacttataacttggcacgcatgaatttaatgatgcacgatgtgtcatttaacaatatgactttaaacaatgctgatacacttgaaagtgattggccagacggtcctgatgaagctggggttgatcaacctaggagttttgatgcagtggttgctaacccaccatactcggcaaaatgggataataatgaaacgaaactaaaagacccccgttttagtgaatacggtaaactagcaccaacttcaaaagctgacttcgcattcgtattgcacagtctctatcatttaaacaacgacgggacaatggcaattgtcttgccacatggtgtgttattccgaggcgcggctgaaggcaagattcggcaaacgttaattgaaaaaaattatttagatgccgtcattggcctaccagctaacttattttatggtacaagtattccaactacaattcttgtttttaagaaaaaccgccaagtgaaagacgttctattcattgatgcaagtagtgatttcgagaaagctaagaatcaaaataacttgcgagatagcgatgttgataagattgtcgctgcatacaagagtaggaaagatgttgataaatacgctcatgttgcaactgtagatgaaatcaaagaaaacgactttaaccttaatataccgcgttatgtagacacttttgaagaagaagaaccaatcgacattgatgaggttaaaaaagaaattgcagctatcgatttagaaattgcaaaattggaaaaagaatttgcagaaatggaagcacagctcgtatcaacgaaaaaggagtctgattaaatgaaagagcaaaaaaagcaaccagaactccggtttaaaggctttactgacgattgggaagagcgtaagttgggggacgaagttctgatagtgatgggacagtctcctaattcagaaaattatactgacaatcctaatgatcatattcttgttcaaggtaatgctgacatgaaaaatggtcatgtttttccaagagtatggacaactcaagtcactaaacaagctgaaaaaaacgatctcattttgagtgttcgagcaccggttggagatattggcaaaacagcttatgacgtggttatcggtcgaggtgttgctgctatcaaaggtaatgagtttatatttcagaatcttgggaaaatgaagtctaacggttattggactagatatagcacgggttcaacatttgaaagtattaattctagtgatatcaaagaagctatcataagtatccctagaattgaagagcaacaaaaaatcggctcatttttcaaacagttagacgacactatcgctcttcatcagcgaaagcatgatctgctgaaaaagttaaaacaaggatatttgcaacaaatgtttcctgttaaaaatgaagttgttccacaattaagatttagtggttttaaagatgattggggacaaattaagtttaagaacataataattcgcgtaaataaaagttctaattccaataaattgcctaagatagaatttgaagatatttctgctggagaaggcagattaaataaggatataagtaaaaaatttgacacaagaaagggaattgaatttgaacctaatgatatattatatggtaaacttcgtccgtatttaaagaattggttaatgccaaattttaaaggaatagcacttggtgatttctggatttttagatccacgaataatatttcgaactttgtttacaatctaattcaaactaataaataccaaaaagctgcaaatgatacatctggaacgaaaatgccaccttcagactggaaaaaagtatcagaaacaatgtttttcatctctaaaaacttagaagagcaacaaaaaatcggagagttctttcaaaaattagatcaagatctttcacttcaacaactcaaaattgagcagctacagcaattaaaacaagcctatctccaaaaactttttccttaaagagaaattcaaaaaaggccacgaaaattcgcggcctttttgcttagttcagtgtcatcaagcactgcattattttgtcattatctttactatcgagttttttaataatatgcagatacgttttttgcgtggttgtcatattggcatggccaagtcttttagccactgatgctagtgaaacacccgcatatagcaaaattgaagcgtgtgtatgtctgagaccatgcacactaatgacagggatatgcgcttgtttacatttacgttctagataatgattcgctgtatcattatgtgttcggcgtgttctgtcgatgaaaattggttccttttcgggtaaatctttaattaaatgtgcgaattgagttgcgatttgccagtctaatgaaatttttcgaactgacgactgattcttagttgattgaaagccgccgcggtaatgcttgtaattccatgttttatcaatcgttagttgttgggttctaaaatcaaagtccgatggtgtcagtcctagtgcttcaccgaaacgcaaccctgttttagcgagtaatagaatgaagtaatcccagttaacctcgtcttctagattcaagacaccaaaaagtcggcgcaaatcaccctgattaagatatttcatcttatggcgcctttggacaacacctttgataatcgccttacgcgtcggatctttcttcaaataaccttcatcaagtgcatcgtagattgccgattttaactgatgatgaaaatccatcgtcgtttgatgttcatgcgtcgcagcataatcgtttaataattgctgataggctcgccgatctaagtctgacaataatagcgtaggtgcaagatttttaatctgccgttgcgttaattcatatttatcataagtaacctgcttaattgcgccgcgcttgtataacaccatccattcttcaaagtattcgtgaaaaagatattttccccgcataactaaccactcccctataaaaaatagtgaccaattttggtcactatcaaagtataaataaatagtcgttttaatatcttgaattaacgaattttgtttaagggaagagtttttggagataggcttgttttaaaacttttagttttcccactttagactgatgaagagcgatagtattgtctaactgtttgaaaaatgagccgattttttgttgttcttgaactaattttggaatcataaagtcaaacgaatcaatttcttttgacgagacatttggttgagcacctgaaactagaacagactcaagttgcatcatgaataattctgaacggacgattgtggaaataaagtcatagtcgatacagtctacggattgaaaataaccaactcgctgattttgataaaccttgtcatgagaagtttgagatagtatagataccttacctgttgttgcgcctgacatagctaagactgctgatttatctggaagaatatatttgtcatccttatcctgttcatcataatatgcaaaagctccacctacctcaccgctggaaagaatatttgaaattctaacaattggtacaccagtgtttctgaattcagagcttttgaacgcaaaaccgccacgtaagggagctacgtcccccaacttacgctcttcccaatcgtcagcaaaccccgcaaatcgcaattcaggaacttttgcaccatttttagggaacattttttgcaagtagccttttttctgttccttgagcaaatccaacttacgttgatgaagagcgatagtgtcatctatctgtttgaagaatgaaccaattttttcttgttcctcaagaataggaataggtatttcttggctcctaactagttcagagttcaagtttacttggctacctggttgcccatattttttccaattaggtctaaacatgtcaagccactggaacataaactctctttcaaataatgggtttaaaaatattaggaatccatcatgtacacctgttttgacataattcaccagaggttttccaacggttgcagcaatacttaatagcagatgtggctcaattaaaactcttgttttctcctggcccaattttgagatacgctgatcaagatgacgtattctcccctcctgttcagttacatctgaaattctgagccatccaatatcactatctttatcaaaccattttggatcttgaattggccttgggcttgctccacgaacaatattagctaaatcacctaacttacgctcttcccaattgataagcagtgttcgcatatcatttttagaaaaataaactagtgatattcgataacttttacgctcgataaaaacgtaaggtttttacggttttttaaaacgattatttcatattttcaatctatgctaaaataatcataaataaaaatttgaagtgaaggtgccgggtatcgttaatactgatgaaaatgtgagtcaatttaagtggttattacgtcgctttgtcgaacaagcgaatttgaatattcaatcaaaagaaggacgcagtacgacagtgggcgcatcggggtttgaaaagaatcgatttagacataccggtaattttgatgagttggaaatcgataatattcattatatgatccatctttttaattcgggatcatatggaccacttagcggtgaaggcgatagtaagttgccatatttgaattatgatttggcagtaggtaagagtgttaatatccgtgcaagtttcagacagcagaaaattgaaacgttacgaattattgtgcatcaagatcaacacgatactgaattaaatgaagcataccaagtggacgatttagatttattttcgaaagatatacccaatcagaaacttactcatttttatgcaacatttacaaactatccagtacggaatggggacaatgatgtgttaggtaatttagaggaaaaactgaaagaatctaaaaatattattctacggggcgcccctggaacggggaaatcatatcttgctaagggcattgctgcgagtttaattagtaatggttctgttcaaaaatacgctgacttaaccttagaacagaagcaacaagttggttttgttcaatttcacccaagttatgattacactgattttgttgaaggccttcgtccggttaccactgatgatggggaaatgggatttaaattacaaaacggagtatttaaagagttcgtaatgaacgcaagaaaggctcaaaaaggcggtgctgataattttaaattagtttgggaacaactcattttaaaattagaggaggtcggttatttaaatattccgaatgctcgaagtggttactttcaaattgagctgaatgaacaaggaaatggtctaacgacaagaacctacccaggcgagtacggggttggtaattggattcaagggaagagtcgcttttataataaaacgcagctttacaatatttatcaaggtaaaccgggtgtcgaaaagggcggtcatgataattatcgaaaggcaattgtccaatatatgaaagataatttggggctaaaagagtatgttgaagttcaactgacggcgcctaaaccctatgttttcattattgatgaaatcaaccgcggtgaaatctctaaaatatttggtgaactattcttctcaattgatccgggatatcgtggtgaagaaggggcagtttcgacgcaatataccaatttacatgatgatccgatggagaagttttatattccggagaatgtttatattattggaacaatgaatgatattgatcgatcggttgatagttttgattttgcgacgcgccgtcgattccgctttattgaagttaaggctaatgaacatattgggatgttggcagctttaggggataagcaaaccgaagcgaccaaccgtatgtttgcattaaatcaggcaattattgatgtggacgagttgaatgaaaattatcaaattggtgcagcatactttctaaaactagcaacagtttccttcgaacaattgtggtcagattatttggaaccgttgttacaggactatgtacgtggactctatgatgaggtgaaatatatgactaactttaagagagcgtatgataatcctaataaaatggcaggattgaataatgatgctgaaaacgactagggataatcaacgtgaattaaaagaacactataaggatatccctaaacttacaaataaattagttaatcaaacgctaacgcaactaaagaatgatcacctttttatttttccagaaataattgccaatgccgacgatcttactgccgatcaaatggttcttcgaagtattaatgaggattatcaaaccagtaatttagctggttttattggttatcaagatgagaggctgattattcagtctcgttttgaaagatcggcgaacaattatttttttcagtatctaattgagcgggtgtttgatatgcctaacttgatggcgttaaatacggaggcacagcgggatagattggggtttgacttattggcttttttattgccactttatttaaaaaaagcgctacgcaaaggcctttttaaaacttatggtcggcgtcaatataatgacagtaatatacgtggaacaattgatgtggcacgtcatattaggcaaaatagcccatttattggaaatattgcttataatcaacgtgaattttcatatgagaatgaagtaacattgctaattcgccatacgattgaatttatcagaaataaatcgtacgggaaggctgtgttaggcaagatatctgatgaggtagctacaatagttgttgcaacaaaacattatgaagattatgatcgtcgaacgattatcactaaaaataaagaaaatccgattcgacatgcttattatagagaatatcgaagtttacaacggttgtgtttaatgattttgcagtttgaaaaacaacgaattggtggcggcagtcaacaagtacaaggtattctatttgactgtgcgtggctctgggaagagtatattaatcaattgattggaccgtggttttatcacccaatgaataaaagtcgtgtgggtggacaatacttattcgaccgaggcggattaatctatcctgattttatcagtcgcgtccaagaacagcgtattattgctgatgcaaagtataagccacaaggaaatatcggtaaccaggattatttgcagttagttgcatatatggcacgctttgatgctcaacaaggctattacatctatcctaatcatacgaacgaactcgttacgccattgcatctgagacaaggagtaacctatgaggataatgtatcagtccgtgaatcggtgatgattgcaaaattaggtttgaagattcctgaggtacgggccgaaacagatgatgctgtaggttatcaagcgtttaaagaagcaatgaagaagagtgaagaaaacttcctaacgtcttttttgaagtaatatgatatgtaatgctttaaactatggagctataaatttgaattcgcaagtcatggttattttggcccgcatgaagtatatagtctcgatttagaaactggtttgatgattggcagaatggtaacgcatgaatttattcaccctgaagaaattaggtttcaattggatgcagatactatccgtcgggttcgtaatcgactttcaagattgcaacttccgaagtgggctgactattatattaacgagtctatcattgatggtgagcaatggtcagtaaccgcgacctatgcagacggaacagtgattgagtctggtggctctaatgattatccgcctcgctttgggacagttagaaatttgtttaaaccagttcaacaacagtttttaaaagattagatgtgtaatgaataaagccttagggattagtttttcaagctaatccctaaggctttatttttatgagtgctttagttattctcgtagtatcttctccatcgtcttccccttcgccaattcatccaccaacttatcgagccagcgaattttttgcatcagtgggtcttcaatggcttcaacgcggacgccgcaaaccacgccggtaattagattacaattgggattgatctgtggtgcttcctcgaagaacgtttggtaggggatgtctttagcgagttgggcgtcgagttcgctttgtgagtagccggttagccagcagataatctgattgacttcggcttgggtgcggtttttgcgttcggctttttggacgagcatggggtagattttggaaagagacatgttgaagatgctttgtctgggcatgagaaggcctccttggcagtttagataattaatatatagcatgtaatgaaaatgaatacaaaatttaggtctgagaaagagtgaagttatttttcactctttttcttttgccctatttcttttccgttactttcttgttataatcgataccagttgtccgtgttataatacagcggactaaatgttataacagaggagagtacagatgaggattggcgatattttaacgaagacgtttacgaacatggatattgtgagttcgatcacgtcgacagtgtttattattttattaggattctactgccgcaaacgcgagatcttcacggataaatttgggaagattctgtcaaaagtcgttttaacggttgctttaccagctttggcattcaactcattcatgcaagatattaatgggaagactttaaaagaaggcatcaacgttttagtttggggcttcttgatctatattattttaattttaatttcaaaaccgttatacttacgctttaagggtgatcaacaagatacattgcgcgtgttgaccatctttggttcaacaacgttcttcgggattccaattgttggagcagttttcggagctaaaggggttatgtatagctcaattttcaacattggttatcgcgtgttcttatactcatatgggtacatcaagatgagtggcttgaagatggaatcgaagaacttgaaaaacatgttcttaaatccaatcgtgatcgccacatttgcggggttaatcatctggttaatccaaggcgcattaccacaagtggcggttgctggacattcagtggccttcttacgaattgatcaaacagcgccatggttgttcaaaccaatgacgtacttagctggtttatgttcaccattagcttggttagcaattgggacaacgcttggcgaaatcagcttcaaagaagctgcttcggacaagacatcatggatttatagtattaacaaagtgattttagtacctgctttaaacatcctgttattggccatcttaacaatgacccacattttaccagttagctatatcagtttggcaacgattgtcatcatgatggcaacgccaacggcaacggtcgccgctgcttacgcgattagttttgacaaggatgcggtcttagcatcgaacgcgtcattactatcaacggtcttagctgttgtgatgacgccagtctggttagtgattttagaagtgattaaccaaatcgggattttctaggaagagggaaattaaatgtttaaaattgcttgttacggcgttcgtccgaatgaagtggcgacgttcaataaatataacaactacgattatgatttaacgttaattgaagacttattgacgcacgacaatatcgaaacggctaaggggcatgacgcggtcttgttacgtgccaactgtaccgctgatgcgcaaaacttagcgaagttgaatgaatacgggattcgttacgtgtttacccggacagtcggttacggtcatatcgatttggccgcagcaggcaagtacaacatggaagttgctcgcgtgccagtctactcgccaaacgcgattgctgaattggcattgacgctagggatgtcattgttgcgtcacaccacttacacaacgaatcggacagcccatcatgatttccgtgtgagccctgtgatgttcagtaaagaagtccgcaactgtacggttgggattatcgggactggcaagattggctacaccgaagcgaagttatacaaaggcttaggtgccaaggttgtgggttacgacttatatccatcagaaatcgctaaggaagtgcttgattttgtcagcttggatgaattattagcccaaagtgacattgtcagcttgcacattccatacttcgctggtcaaaacgaccaattcatcaatgcagacttaatcgcaaagatgaagaacgatgcaatcttggtgaatacagcccgcggtcaattgcaagataaccgtgcgattatcgatgctttgaaagctgatcaacttggtgcattcgccgctgacgtgttaccagctgaaggcgaaatcttcttcaagcaattcccagcagaccaacctgttccagatgcaaccactcaagaattgattgatttatacccccgcgtcttgttgacaccacacgttggttcgaatactgatgaagctctcaagaacatggtcgaaattagttttgaaaacttccatgaaatcttgacgacgggtaagacgcaaaatagcgtcgcaaccactgaaaattaaagcggttgtttgtattttcatgaaaaatatggtatattgttatcagtaattagatacttcagagcgagtgagcagaaatgctcactctttttattggagcacgtctaatctgaaatataaaaatgaattggagggaatcatttgagtaccgttgtggaaacagttcacgatctgatcgtgccgattcttgatcaacaccattttgaattagtggacattgaatttgttaaagaaggtagcagttggtatctgcgcgtcttcattgacaaaccaaatggcattgaccttgaagattgtgccttagtaaacgatgcgttaagtgagaaactggattcaatcgacccggatccaattccgcaggcttatttcttagatgtttcatcacctggtgcagagcgtcctttaaagaaggaagccgatttccaaaaagcacttggcgaatacattcatatctcgttataccaagctgttgatggcgagaaaatctatcaaggtacactaaaagcccttgatgatgacactttaactttagtgattaaaattaaaacgcgtcaaaaagaagtaacgtttaatcgtaaggaaattgccaaagctcgcttagcaattgaattttagtaaaggtaggctagttacatgagcaaggaaatgttaggtgcacttgatgcgctagaacaagaaaaaggcgttaaaaaagagattgttattgaagcccttgaagcagcacttgtttctgcttataagcggaattacggtcaagcacaaaacgtggaagttgaattcgatcaaaagaagggtaacatccacgtctatgctgtcaaagaagtcactgacgaagtgtttgattcacggcttgaagtgagctaccaagatgctttggcaattaacaaggcatacgaagtgggcgatacaattcgttttgaagtcacaccaaaagacttcggccgaattgcagcccaaactgctaaacaagtgattatgcaacgggttcgtgaagctgaaagaagtatcatttacaatgaatacagccaatacgaaaacgaaattatgcaaggggtcgttgaacgccgcgataacaagttcatctatgtcaacttaggcaagatcgaagctgttttaagcaagcaagaccaaattccaaacgaggaataccaagcacatgatcggattaaggtttacgtttcaaaagtggaaaatacaactaaaggcccacaagtctttgttagtcggacacaccctgatttagtgaaacgtttattcgaacaagaagttccagagatttatgacggcaccgttgaaattgtctcaatcgctcgcgaagctggtgatcggacaaagatggctgttcgttcaacagaccccaacgtcgacccagtcggcacctgtgttgggcctaagggacaacgggttcaactagttgttaatgaattacacggcgaaaacatggacattgtgaagtgggaagaagatccttcagactacatcgccaatgccttgaatcctgccgaagtcatcgctgttcaatttaacggtgataacgaacatacatgtacagtcatcgtccctgattatcaattgtcattggcaatcggtaaaaaaggtcaaaatgcacggttagctgcgaagctaacgggctacaagattgacatcaaacctgaatctgaagtcgaattcgttgatgaagacgatagtcaagatgaaggtgcagtcgttgaaggttttgaagaagaaacaacagaagctgttgaaggcttcgaagaccaagcaacggattctgctgttgattctgaagaacaaccacaagaataagtgaggtgttcatgatgaaacaaagaaaagtaccaatgagaaaagacgttatttcgcaagaaatgaagcctaaaaaagaaatggtgcggattgtaaagactgccgaaggtgagattagtattgacccaactggtaagaaatcaggtcgtggcgcttatgtttcactagaacctgatgcaatcaagaccgcccaaagcaagaaaattttagaaaagacgtttgggattgacgttgcagaatcattttatacagaattattcgaatatgttgatcatcaaaaggctcggctagaattatttggagaacgaaaatgagtgaacaaccagaccgtttattacaactcttaggtatttgcatgagagcacggcaactggtcagtggtgaagaacaagtcctaaaagccattcagcagcaaaaagcgaaattggtttttatcggctcagacattagccaactgacacagaagaaattgactgataagagtcatttctacgaaatcccggaaacaaaagcgtataccgcggcccagctaacccaagcaattggattacatagagccaccatcgcggttgttgatgccgggtttgccaaaaagatgataacgctactgggataataaaggagcgtgaagatatgggtaaaaaacgtatctatgaattagcaaaagaaattaacgttgccagcaaagatcttttagaaactgccgttaaaaaaggttacgatctaaaaaatcacatggcaactatcgatgacaatcaagaaaaagctttgagagccatcttccataaggaaacaaaaccagctgcaacgacaactgacagcaagccagccgcagcacctgctgcaccaaaggcaagcgaaaaaacagataacggtaagattaagattaacaaagccgctatccgtcgtcgtccagaagctagcagcaaaccagcacctcgttcaaacaaccaacgcccacaaggcaaccggaatggccaagcatcaaatggtcaaaaccgcaacaatgccaatggtcgtcctaacaacaataacgcccgtcctaataatggtcgccctaacaataatgcggctaaccggacaaacggcaatacgcgtccagctgggtcaaaccaaccattgagcttgcaagaacaaatctcacaagctaatgcacgtcgtcaaagaacgcaagaacgcattcaacaacaacgtgaacaacgcgaagcagacgaaaagaaacgccgtcaacaaagtaaccgcccacggccagctgctaaaccaaacggtaataacagcagtcgtccagccggcaacaagccagccggcgcacgcccaacgacaacaaataatcgtcctgcaaacagcaataacaacggccgtccagcaaacaatacaaacagccgtcctaataacaactcgaaccaaagtcggccagtttcggcacaagaaatgcaacaaaaaatgcaagctaatacggtgagtgctgctaaaccagcatcaaacaatacagcaagcaagccaaagaactttggtccagataagaaacgtggcggcgggtataacagctacggtaacaatcaacaacgtttcaataagaaacgtaagaagacccgtaagcaacaattagctgaacaaaatgctgctaagaaggaaatgccacaacgtaaagaacggccattaccagaagtattagtttactctgaaggcatgaacgttgcggacatcgctaagaagattcaccgtgaaccagctgaaattatcaagaagttattcatgttagggattatggttaacatgaaccaatcacttgataaggatacaatcgaattattagcaacggattacggcatcgaagcagaacaaaaagtggaagtggatattgctgatatcgattcagtatttgaaacagaagctaagagtgatgccaaccttgtgagccgtccaccagttgtcacaatcatgggtcacgttgatcatggtaagacaaccttattggataacttacgtaacagtcacgtgactgatggtgaagccggtgggattacgcaacatatcggtgcttaccaaacgaagttaaacgatcgtttaatcacattcttagatacacctggacatgcggccttcagtaacatgcgtgcgcgtggtgctgatatcactgatatcatcatcttagttgttgctgctgatgacggtgtgatgccacaaacaatcgaagccatcaaccatgccaaggctgctaaagccccaatcatcgttgcggtgaataagattgataaaccaggcgcaaacccagatcacgtcatggaacaattgatgggttacggccttgttcctgaagactggggtggcgataccatctttgttaagatctcagctaagactggtgaaaacattgatgaattacttgaaatggtgcttcttgaagccgacgtgcttgaattgaaggctaacccagatcaaaaagcggttgggacagtgatcgaagcccgtcttgataagggtaaaggacctgttgcatcactcttgatccaacaagggacattgaagattggtgatccaatcgttgttgggaatacctttggtcgtgtccgtgtcatgacaaatgatcgcggtcgtcgtgtgaaggaagtcttcccatcagaaccagttgaaattactgggttgaatgatgtgccacaagcagctgatcgtttcgttgtctttgaagacgaaaaaacagctcgtgctgctggtgaagaacgtgctaaacgtgcgctcttgaaggaacgtagccgttcaaaccctgtcacattagataacttgttcgaaacaatgaaacaaggcgaattaaaagaagttggcgttattatcaaagccgacgtacaaggttcaacagaagccttggctggtagtttacggaagattgaagtcgaaggcgtgcgcgtgaatattattcatgaagccgttggtgcgattaacgaaagtgacgtcacattagctgctgcaagtaacgccatcatcatcgggttcaatgttcgcccaacaccacaagctaagattcaagccgatgctgaacaagttgatattcgtttacaccgaatcatctacaaggcaatcgaagaaatcgaagctgctatgaagggtatgttagaaccagtttacgaagaaaaagtaacgggtcaattaactgttcgtgaaacatacaatgtttctaagatcgggacaattgccggttgtatcgttgacactggcgttatccaacgtgatagtggtgtccgcttaattcgtgacggtatcgtgatttatgaaggtaaactttcaagcttgaaacgtttcaaagatgacgttaaagaagtcaaaactggctttgaatgtggtgtgacaatcgaagattacaatgatattaagattgatgatcaaattgaagcctacgtgatggaagaagtacctgttaaataattaatttacaggaggacaagcaatgaaacatcgtgttggtcgggttgaacaagaaattcaacgcgaaataaatgacattttattaaaaagagtgcgtgatccccgagttgaaggggtcacaatcactgatattaatctcagtggtgacttacaacatgttaaagtttattacagcattttatctggcttagcaagtgacgctgaaaagacacaagctggcttagataaagctaaaggattgattcgcagcgaacttggccaacggattaagttgtacaagattccagaaatcacctttgaacaagacggttcagtgcgttatggtgaacatatcgacgaacttttacgtaagttacacgaagatgaagcacagcgttaaactgtgaaaaagagtcccgcgaaagcggggctctttttttgtttgaatgaccttatggaagcgataacctattaaattaacttagtcgtttgcaccatattactattctttcaaaagttgattaaatatcgaccgttaaaatatatcgtccaacgctatcggcggcgaattgttaagcgttatacagaggccttatcagtatctaatcgctggtttcagttttattattatcaacgagaaatatcccacattattccacagattctttattatttagaggctaacccggcattagaaacgattgatgatgcgattgcttatattgatagtcagccggttagttcagagctgtatcaaaataacttaagcgagtttcgtaaatatgttaagcagtttaatacaatggtgctgagtacagcgaacaacctgggacaaccggctagtcgacagattaattttgtcacgcttgatgggataccgaatgtctggtattttggcaccgaccccgaagcgccgaaagtcagtgaactcgatttggggcgagccgcaatttttacgctaccgactagtgaagaattgtgaatcacgagtaaccggctcaaggtataccgaactcagtatcgttttagtgatatagcagaggcctatcaaaaacaagtaccaggctatgttgagagtttatccaaagaagaataggaaaaagagattatttttgcgatcgaattaaaaagtgctaggatcgatagtcggtttcaaaataaaggactcactttttctgagtaaaaaaggttactaataaacccgccataatatgtatttttctgttaatcctcaaagccaacccgttcgactacgcactctatagtatttccccgttgcttttaatgactttttggtaccagtagaaactgtcttttggatagcggtttagttctctttcttctgtttcgtcgcgatccacgtagacgaagccatagcgtttttgatagccgtttgtccaacttaataaatctgtgaagctccatgtcgtgtaaccgatgaccgaaacaccatcggtaatagcttcgtgaatggcttgaacgtgcgcctttaaaaaggcaatccggtagtcgtcgtgcacttgcccgccttctttcaaggtgtcataagcccctaaaccgttctcagtaattaagaccggcagtccataacggctctcaatacgtctgagtgcgattcgaagtccttcggggtcaatattccaatcccagtcagtttgttgcatataggggttatcagcggtcttgtagacgcctggcaacccacttgcttggctagtgccctttttaccggaagtattttgcttggtcaaaccaacgccaccttctagtgggttagtcgtaaccgtcatcgtctgatagtaattcaaccccataaaatcgggatgtgcgagtggatcggctaataaagcttggtccgcttcagtaatttcgggtgcaatcccgtttcgttcgagataagtcatcactaatttcggataacggccccaagcataaacgtccatccacaaatcagcgttaatttgttcggcattatcagccgcaatttgattttctgggtccgcattcagcgcataagttgggctgtaggcaaaactaggtccgatgcccccttgatagcctttttcatggaataatttaatcgcactagcattggcaaggtttgccatatgattagcttgataagttcgcttagcatcagtcactgctggcggatgctccgctgttaaatagccgtgagtgatgaagacattttgttcgttcaaggtaacccaatgttgcacacgatcgccgaagcgttcgaacaataagcctgcgtagttggtaaaatcttcaataatttgacgcgattcccaaccgccatattcggcttgcaacgcttgcggtaagtcccaatgataaattgtcacgattggttcaatatcattggcaattaatgtattaattaaacgatcataaaaggctaagcccgcctcattcacagcgcctttaccatttggtaagacccgtggccatgaaatcgaaaaacgataggctttgagcccagcgcgtgccattagcgccacgtcttcttcgaaacggtgatagtgatccaccgctacatcaccattcgtggctttgaacgttttgcctggaatgcggacaaattcatcccacacagaacggcccttaccatcttcttggtaggccccttcaatttgataggccgcagaagctgaaccccacaaaaaatctttaggaaatggtgctaattgatggtattccattactggtcatcctactttctctcaaagtcattgcttattgttctgcttgatatgctttttcgatttgtttcaacattttcttaaagccgcgtttacgcatgaaacccatgacaaaggccatcaacatatcattggtttgttgtaatttgccatttgctttggcattttcgcgatagatgacttcaatagactgcggtccattcgcgaaaatatcgtaacttgattgatagctcccccgggtagaagtcgtttcgtagtgatagctctgatctttaatcagttgcgtaatcttcagtgtcgcccgattcttgccaaattgcttgtcgtacgaataattaggcaactgcgcttcagttagtttatccccagtttgttgcttaatatcaaacaacactgattccagaatcttctgataaaaataactagctggcatttttaaatttaatttaatttccatcccgttcccactcttctcttcaatgtgccatttgttgcttttaactaaaaagagctcgaacaaaagtcattttgtcctagcccttttgttcattagccaaactttaatcgactggtacaccggccatcttcttgtaaacgtcaacgacttcgcctgctaaatcgcggaaagtaattgcgttcatcaagtgatcttgtgagtgaaccgtcaataatgtcacttgcatgtgatcgccacttgcttctttggttaacatatctgtttgtgaattatgggcttctgataaagcagcatccgcttctgcaagtttggcagctgctgtttcgaagtcacctttcttagcggccatgattgcttccattgagctactcttggcgttcccaccgttgataattaagcccatgattgcttctaagttctgttcttctgccatagtatggcacctcctatgatcatctcatcgtgaaccactttcgtaaccattcattaattggtctagatatttcttcgagaatgactaaccaatccattaaaaggctttcaaaaattagttcctgattgtgagagttcgccactatcgcattttacgaagcgaaagaaaacccttacttatattgtaatcgcttcctgagatttgtcaattaattactgataaccttttcacaaacggactagtccaaaaaaaagaaaccttaacaggttgttaaggtttctcgctcaatctggattagaccactagtcattatttttcttatggtagcccttattcttttgatttcgtttacgatttttcttatgttttggttttaatggtgcagctggctgttggcgaactggtactaatttggctttgcgcgcgcttgtcgtcggcgtagccttttgtacttgtccttctgttgcttcaccagtagttggtacagcagatgttgctttcgttgcagcaactggtgctactttaggcgtcactggtttttcggcttccaaatggtcaccgaccaaataacgggtcacaagatcatattcaggcgccaataacttacgcaaattccgcccatcgtgttgattgcccaacgtcaaaacagtccccgtgcgtcccatccgaccagtccgaccagcacgatgaatgtaagtgatttttgcgtttggtacatcaaaattaatcacataaggtaagtcggtgatatccaagccacggccagccacgtccgttgctagtaagagttgaatcttaccttcacggaaatctttgagcgctttttggcgttctgtttggcgaccttgccctgagagtgcggcatacgttactttttgatgttttaacgtttgtgcagcttgtaagagttgcgcggattggttaaaaatgaccaatcctctaaaattcttttgatgtgctaaatggcgtaagacgttcactttttgagcgttaccagttgggataaatgcatgcaacacttccccacccgtcttatcaatcccacgcacgtcgattgtttcgattggcacgccgaaccatgtttccaactctaataagatatcggttgatgtcgctgaaaagaagccaagttgcacatcggcaggtgattcttgcacgatatggcgggtttctgaaagcccgctatccgtcaataattcgtcagcttcgtccataataatcgcttggagtgtatggaatttcactttccgttgttcgctcaattctaataaccgaccagtcgttgccacgataatctctggtttggccttaagccgttcgatttggcgtttaacattcgccttccccgtaatcgcttggacattacagtcgattgccttggcataaggttgaatgacgtcccgtgtttggatcaccaattcctgtgaaggggccaaaattaagacttgtagcccttcgcccggcataattttttctaataacggcaatgaaaacgcgagggttttcccagaacccgtgggtgccagtcctagaattgattggtcttttttcagtggttgataaactgcctcttggatgggtgacatttctgtaaatccttgttcatcccatagtgcttgaaatagtggtgaaacgctcatgtattgcctccgtcatgttaatctgcatcaaatgttattccggccgactgtcttaattgatataaaacttggttgaccgattcacttagctgtaataattcatgataccgttttgtgtcacgattagcaatcatcgccgcgaaattttctgcctcagcaaccattggattagcaagtgattgttcccctagtgactcaatcttttgcccaccttcgctgtagcggtcaacactgccgattgtgccggcattatcgaggacaatcgtcgtttggccaccataaatttcagacgttagataggaatcaacggttttgccaaaaatcaacgtgacgttaaaggttggataacacagtgttgcgacccctttaccatccactccagttggtaacaattcagcttgataatcgactgaatcgggcacaccaaaccagctgacggcatcatagacgacatacacgccgagatcttgtaaagctcctccagaaaaatgtggtgagaaaatattcggttcttcacccgctaaaacagcgtcatagcgtgatgaatatttcatatagctcaaggtcgcgccattgatcgccggtaatgcgttgatggcttgttgtacaatcttaaagttggcctcatgaatatgacgtgctgcttcgaataagaattggtctggatgttgctttaataatgtttgcatggctgccatttcagccggattactgaaggcaggtttttccacgatgacatttttacccgctaaaattgcttgcttcgcttgttcaaagtgcagactattaggtgatgcaatgtagacggtttcaaattcattggcattcataaacccgtctaagtcagtgtaacttgtggcttctggtgcgtgatacttcgttttaaattggtcggctttatctgccgtccgtgaataaacagctgttaacttaaatgattcagattcctgggccgcatcaacaaattgtcccgtaatccagttagtcccaataatcccaagtgtttgcattataatcagctcccttatttaatactgccagtatacgggatttagatctaaaagcctatcgaaaagtttttctactgataagaattccgccactattcacttctttaaccattccttaaaaaaccagtcgtaagtccgataattaattgtccgcaaactaactatttcgtggtagaataatagtaagttggggtgtgacttatgcgattttttaaatttcaaaaaccacaagcaattttaaatcgaaccattcaccagtatcagcaaaaagttcggacgactcaagcgagtaaagtagcgactttttatgctggacactggtcttttaatgacaaccaaacccgaaaaaaacacacattagaaattacaccgaacttgttggtgcaaatcgatcataagccattgagtggtcaagtcatttccctcacggaaaacgaattggtctttctcgatcactacggctatcaattaaaaattacttgtgaaaatcaacggcccgtttcaatttacgatgaagccgaagatatggattatccaatcgaatagctattaaaaaaggcccataacgcttagcgttatgggcctttttagttattctttatttgttcaacattttttgagctttatctgggacttcgtttttggcaaccttttcccatgaaaccacacccttatttttattgacgattaatttgaggtacgcatttcgtttaagcggcgttgatttgttaccattaaaatcaacttttttggtaacaccatcttcattgtaggctgcttgttgatagttataatcgataaccgtttcccctgctgaatccttttcttccattcgtgttccgtttgaaacaatctgtgtatagtaggcttccccaccgtaataatagctatgaattccccaactaccaccgatgaaaaccaccacgattgcgattaataataaccagcctttgtgtttaatcattattttctctccgtttctatttaatagtctgccattgttgcttggtgccagtaaaaactgctaactgatagttcgtctgattatcactgtttggaatctgactagccattgtgtattgccagaacccgttcttagtcgccaatgttggctgttcccgcgtagtttgccacaatggatagtctcctttgtgtggcacataccgttttaataagctgggtgcaccaccaatgagacaattttgatgataatgttgattaatcaaggtcactagctgcgccagtgccatttgcgttttcttttgtgcgggcggttgttgtgcatagtcgttataataatccaaatagatcataattggtaaatcacccgtctggctgccaactgctttaaaaagttggtcagcttggcgttcaggcgaactatcaaaactaaaaaaatgaaagatgcccacgcgtaagccagtgccacttgctcgactgtaattggtgtcgaaattatcatccttgtaactggccccttcagttgcttttaaataaacaaactgaataccgtccttttttaacccgtcaaaatcttggtaaccatctgactgacttaattgcatccctagaatcggatattgcgtcgcgcttggtcgatccgaacggtgtttcaaccaccagatagcaccaccaagacacagagctaccgcgataatgccgataattatttgtcgccaatagcgcttttggaaactgtcttgaaaaatcggcgtcacttttcgtctcatccacggttcctccatttccagccttagtacgcttagtttactatcttcatgcattcgagacaagccacctaacaattttgttcgttactgtcacttagagttgccttttattggtaatcagatacaatgtgaacaaagggaggcggaatatgttagatgaacgcttagtggggttaacgtttactttacaggatgctaaatcaaccggcaccgttaatttttttggcatcttatatcattaccgtgtcgaaggaccagctagcgctggcttactcgtcatggtaacggccgtcacacctttagctttaatcgtgacagcgcaccacaatattctggcgtattaagccagacaaaagggagtttttattatgggtattttcatcagtattttagtcattcttgttttagttattgttgcagtcaccctcttttcatcatttgccttgattcataccggggaagttgggattttggaacgcttaggggtctacgttaaaacgcttgatcctggtttccatttggtcattccattcatttatcacatcacagaaatcgttaatatgaaacaaatccccttaaaagtcgctgaacaagaagtcattaccaaagacaacgtggttgttatgatttcggaaacgattaaatatcacatcactgacgtcaatgcgtacgtttataaaaataaagattccgttctaagtatggtccaagacacccgtgcacaattacgtgggattattgggaacatggacttgaacgatgttttaaatggcaccgaaaaaattaaccaaaccctttttgaacaacttagcgaagtaacagccggctacggcttaaacgttgatcgggtcaatatcgattcaattcaagtggcccacgacatccaagaatcaatgaataaattgctccgtgcttcgcgtgaaaaagaagccaacattatggaagccgaagggctcaaagccgccgcaattcgtaaagctgaaggattaaaagaagcgaatattctagaagccgaagccaataaacaaacacaaattttggaagctgaagggaaagctcaaagtgaacgaacaattgccgaagctgttaaagatcaaattaatttgatcaatgccagcttagtcaataacggcgaactctatcttcaatataagaatattgaagcgatggaacacatcgcagacggtcaaaataacaccattgtcttgccaaataagtcaatcgatagcttgggtaatttgccagcaattggtgctctggttcaaaaagaaagtaccaagcattctaattaatgaatgccaataaaaaaggccccagaataacaaccttactgttattctggggctttttttattggtcctctgaaggtgttgaatccttaggtgttggttgtgtattgcgggtgttctttttgctgagaatgtattgttctaacaaggccacaatctgttgattctgtggtagatcagagtgttgtgcttggtcacctgtcaccgtaatttcggtgtagtgcttgacttgcccttgataaatgtacttccccgcctctacactacgcgcgggtacaatcccatcattttcaaagttttccgttcccgcaattgaatacatcgataagttcgtcggaatatttttacgtttcttaatgaaatccgtcagcatctgtgacttatgcgtaatcgatgtttcggaaaagttatacggcgaaccaatcgtcatcaacttcttcactgtaatatcatcgcgattaaaataatcttctaaaaaagctgtataaattaagccgccattagaatggccaaccgctttaaagttattaaattgatacttcttagtcaacgcggtaaatgcgagcgaaaaccatttagcttgcttttgaatattactataaccgtccttattgttttcaaaaccaaccacgataaacggttcattatcccgcggtttaatttcccctgaatagctaatctgattattttcatgcacagttagttttaacaagctgtgccgattcccgcggttagcgttcaatttagccactaattcatcaaaccgattttgggttgcactactccctggaataaaaattaccggtgacattcgtgaatcatggcgcttagctaaggtcatcacgctctggcgactccattgagcagctggccacattaatccgccgatcaaggccaaactaatgactaacaaccagaggcttttttttcttaatttggccaatttatgccgcctcctttacgagtgctaattgatctgccaattggacaaacggcttgtagatcatcacgccgacgacaacgtttaataccgtcaccgccagcgcgactaaatcaccgttggtgcccatgaacgcttgcaataagccgggggtcccaagtggaaccgtgaagactaccgacggcatgagattcaatgcaactgctgccgatgcaatccccatgtttaccagtggtaccaataagaatggaatcacatacaagccatttccaatgacaggcattcccacaaggaccgcgctattaaagttaaataaaacgggcaacaacgaccatcgaccaatcaaatgataatccctttgtttgctgaagatgaaaacggcaatcactaaggctaatgtcccacccgtcccgccaatcgcaccaaagggttcatacaaagtccctaacgtgaacggatatggaacgtgccaagccgtgtgatgactaaacgcatagtttaagttggccgaagatgcgattccctcacgcccaaattgggccaatgttggcatactcgttaatccaaaaaaagttaagctagtggccgctaaaccagtccccaacgtgaaaagcagacccgtttgatttgcttttagtgattgtaatcgtaagatgacttgatctggcaagattgaaatcgccaaccaatttagcaggatactcagccctaaaatgacgccgagcaccaataaaatcgcccacatagaatccaatgaacgtcctaccgctgacccattcagcggtaaatcgcgccgatgaggtcgtcctaattttttgaaggctaatccagtcagatagccgactaataggccaaaaaataagccccccattcccaacatctggctgttgaaagataagccctcatttggcgtcaaccgtaacgctaagattaaataggcaataagccccgtaatgctggctaattgttcatcacgcttatagtgcttggctgtatagcgcgccgcacacatcgctgctaatgccgcaacgattcctaacgtcaaactcgtaatgctgtcaaacatcatctgaaagatattccgtttactcaaccaattcgaaagatgaaatacattcacaacaaaactattccggttaaaaagtgctagttggatgagttggctgatactcccaatcaagacaaatggaaataacaacattaaacttcgctgcataatctgatagaccgccgcggattggaatcgattaaaatgttgcgctaagcgcatcattatagattgttttttgacattcatgcgttaaccctctaaacatgttttgataatttcattctagccgaccttccgcttaaatgcacgtctgaacgcaaaaaacgggtcgctactttccatctctggataataacgacccgctaaaacgtgctttttgtggcaacttcttccgtctagctacgtctgtcaaatcaccaacttgttggttattcgccagcctaggctatactcagaagttaaccgccacaaacgcactctattttgaaacgtgctttttgtggcaacttcttccgtctagctacgtctgtcaaatcaccaacttgttggttattcgccagcctaggctatactcagaagttaaccgccacaaacgcactttattttaatactaatttagtgacactttcgacgtgtagcgtttgtgggaacatgtcgactggttgtgtgctttctgcttggtagccttgggctgccaatagttctaaatcacgcgccaatgttgctggattacagctgacatagaccatcttggctggttttaattgaccaacggcttcaatgaagctagtttccaaccctttacgtggtgggtcaacaatcaaagcatcgacttttaagtcatctgcttgccattgcgccatcacttcttcggctttaccgagtgtaaattcaacgttttcgatgccgttaatcttggcattgtgccgcgcatccataacagctgattcaacaacttcaacaccgtaaacttgcttagcatgtttagcgactgctaatgaaatcgtcccaatccctgaataagcatcaatgactgtttcgttccccgttaattcagcagcttcgatcgccttgttatacaagacttccgtttgcactgggttcacttggtagaatgattgcgctgaaatttcgaacttcaagcccattaattcatcacgaataaagtcgcggccagcgattaattttgtttcgtcaccaaagatgacgttcgtttgagcagcattgacgttttgcatgatgctgaccacttctggtaaagcttttttgatttcaacggcgatttcacgggcagccggtaatttcttactccgcgtgatgaagacaatcatcatttcgtggctgtaataaccgcggcgaaccataatggtcttcaaaacacccttatgcgtatcttcgttgtatggatcaatgtagaaacgacgcaagatatcacgaatgaccttgatagcttcatcaatcttaggatcttgaatgtagaagtcttccattggcatcacttgatgactgtgtttccggtagaaaccagttgttaaagcaccatcgataaaccgaacaggaacttgcgccttgttccggtaacctgttggatcatccatccctaaaacaggttgcactggaatatctaaatgggctttttggaagacgttcaagacttggttacgcttgaaatctaattgggctgggtatgccaagtgttgtaatggcgcaatcccagtttgtgagtaaatgttagcttttgattcaacgcggtctgggcttttcttcaataaattaactaagcgcgcaaaaccatattgtttattgacctttgtgacttggatttctgcttgttcatcgggcaaaacgccttcgataaacaacggatagttgtcgactttagcgacacccatgccttcataggttaaatccataatatcaaccgtcaatgtttcattttttcttacaggtgcttgtattttcatagttacctctttttaattgtgtaaaaagagtctgagacaaaactgagttttgcttcggactcttttcttagctacaagtgtgcggtcaatccgcccacgttatccaatgttccagtttaacctattttaccatcgccgtctatgtcttcttcagaaattgcttcgacttcctttacgaataaatcttcggcagactgctgagtaggggtttctgatgtaatagcgtgatctggaatatcttccttattcacatacatctcgatatgttgttgcaagttagtaaaggtcattggtgcatcgccaccgtattcgccatctaaattaatcatcatcttaacgtcatcatcaccaggacgcgcaactagttttgacgtcttggtataaatgacccgtggatcattaacgtgtttgccacctttaatgacgagtgcgattaaatggactaattcggccatgttggctgtcttaaccacaatcaatgagaaattaccatcattcagttgtgcatccggcgcaatctgttcaaatccaccaactgaattggttaaaccgagtaagaatagggaagcttccccatcatacgtaccttcatcatattccagatgcatcttaatcggtttaatttggggtaacatctcagcaccttttacgacatacgcgagatagccaaaaattgacttaaagtctgaggggacttcataggtcaattcggttagcaaaccaccaccagcaatgttcatgaagtaattgtcattggcttgaccgatatccatcttaagcgtttggttcttcaaaatcacgcgggctgcttcaaccggattatcacgcggaatcttcaaagcccgagcataatcgtttgttgtcccagcaggaatcacggccatcattgggcgtttttccaagccggcaatgccgttgacgacttcattaattgtcccatcaccgccagcggcaacgattaaatcgaagttcgcctttgctgctcttgtggcctctttttgcgctgaagcttcttcaggcgttgtttgaaaagcactcgcttcataacccgcttgttccaaaatatccagaatatcagcgacactacgtttcatcacttcatgtcctgaagttggattataaattaaccgtgcacgtttttgcattcgaatctcctaaaatatcaattatcgtttgttcaattcggccatcaacaagtcattgacaactttcggattagcttgaccccgtgtttccttcataatcttaccgactaagaacccaactgcgcggtctttaccgttcttgaaatcgtcaattgattgttggttgtcatctaaaatacctgtgatgattggtgtcaacttagcagggtctgataattggaccatgcctttagcttcaacccaggcttttggatccgtgtcattttggataatttcttggaagactttcttagcaatcttcgatgaaataatcccgtctttaatcaaattgatcatttgggctaagtgggcaggtgtgagggctgtctcttgaaggtcaatttgtttgtcgttcaagtaagcattcacttcacccatcaaccagttagaaacttgttttggtgcggcgccatcagcaacagctgcttcaaagaagtcagacatttccttggtgttcgtcaagacacccgcatcgtattcaggcaagcccaattcatccacatagcgtgcacgccgtttagccggcatttcaggcatattgtcttgaacttcttgtaaccaatcatcaccaatgtgtaatggtggtagatctggttctgggaaataacgatagtcatccgcaccggtcttaacccgcatgaggaatgtttcgcctgttttttcgtcaaaacgacgggtttcagggcgcactgtttcgccagcaatcaaaagttgtgattgacgcttgatttcataagctaaccccaaacggacgtgattaaaggagttcaagttcttcaattctgatttcacaccatattgcttcgcaccgattggtcgcacagaaatgttagtatctacccgcattgaaccttcttccatcttaacgtcagatgcgccagtaaattgaacaatttggcgtaacgtttcaaggtaagcataggcttcttcaggcgttgacatatcaggttttgaaacaatttcaatcaaggcagtcccttgacggtttaaatcgacatatgaatagccgtcagagccatgggtattcttcccggcatcttcttcaacgtgcaattcggcaatcccgatttgctttgtatggccatcgacttcgacttcgatatagccatctttaccaaggggttgttcgtattgtgtgatttggtaagcttttggattatctggatagaagtaattcttccggtcgaaatgcgtatcgcgcgcaatatcagcgtgcaaggcagtcgcaaccatcatcccaagtgtgtatgcccctttattcaaggttggcaatgtcccaggataaccccagtcaatcacattcgtgttagtattcggttctgcaccatagtttacaggagatggactgtacatttttgaattggtttttaattcaatatgcacttcaagtccgattgttgtttcgaaattcattaggcttttcctcctttgaagcttggaacgttcttgttaaattgagttgcttgttcaaaggcataacctgcgcgataaacagattcttcatcaaatgctttcccaataatttgtaaaccaactggcatgccatctactaagccggcaggcactgacattgctggtaagccagccatgttagcaggaattgttaagatatcgttcatatacattgtcactggatctgatactttgcgacccaagtcaaaagcggtggttggtgttgttggtccaaccactaagtcgtagtctgcgaaaactttttcaaagtcgcgcacgattaatgtccgcacttgaccagccttcttgaagtaagcatcgtaaaagcctgatgaaagggcaaacgtccctaacataatccgccgtttcacttcatcaccgaaaccttcagaacgtgatttaacatacacatcttcaagtgtcttggcttcaggtgaacgataaccataacgaatcccgtcaaaacgtgacaagttagatgaagcttcacttgaagccataatgtagtaagtttggacggcatacttagaatttggcaagctgacttcgtcaacggttgcccctaatgatttcaaagtttcaatggctgtttcgatttgggctttaacgcctggttcgacaccttctgccatgtattctttggcaacagcaatcttcatacctttgatgtcaccatttaaagcggcacggaaatcaggcactgggatatcagcactcgtactatctttttcatcatgaccactgatggcttgtaaaacagtcgcattatcagcaactgtccgactaaagaccccaacttgatcaagacttgaagcaaaagcgatcgcaccccagcgtgacacacggccgtatgttggtttgatgccgacaatcccattaaatgcagctggttggcgaattgagccacccgtatctgtccctaaagaagcaacgacttcaccggccgcaactgctgctgcagaaccacctgatgaaccaccaggtactttgtctaagttccaagggttctttgtcttcttgaaggctgatgtttctgttgatgaacccattgcgaattcatccatgttgtttttaccgatcacaattgcatctttagcttttaatttttcaacaaccgttgcatcaaaaaccggcgtgaaattttcaagcatcttgctggcagcagtagttgttaagccatctgttaataagttatctttaatcccgattggcatcccagctaataagttatctgcatcaattggttgggcgtccactttggcagccgcagcttgtgcaccagcttcatcgattgctaaaaaagcatcaacttgtggttctctcttgtcaatttcagcaactgtttcagttaccaattggctagcagttaagtcaccagccactaatttggcatggatactttgtaaatcttcatataagtagttcacggctagtcttcctccttatccataatggcagggactttcaataagccgtccgctgaatctggtgcattcttcattaaaatctcgcgatctgtgccagcttgagccacatcttcgcggacaatattttgaaggttattcacgtgggtcgtcactgggacacccgttgtatcaactttatttaattcatcagtcattttcatgatgtctgcaagttgttcagtaaattgttctaactcagcatcgctaaaagctagttttgaaagttctgcgacatgctgaacttgtgttttatcaatcatgagtaaacccctcttctaattctgtcacttttatccattctgattaattttaccatatattaacgtataagaaagtgacatcccttgaaatttaccagtttttcctaatctttaccggtttcagcagatattgaaatatatttttactttctttttaaaagcgtaattgaatgttatgcaattcattagaaggcgatatgatttataagagtttataatataaacgcattcgtttaatcttatatactgaatacagataagaagttgtgaataatgtacaagactatcattaacttatagatgagtgttataatatgaaaatcaatatctcggaacaccttgtagcagtagtagttttaagtttaatgggtggcattgtcttacaaagtacgaccgtttcagcagcgaccacttcggttggtgtaactatcactggtgtaacacctggaatggccgctaaagccaaagaagcagccgcagaacaagccgctttagaagaagcatggttacaaacagaaatcgatgacagcgaacctgtagaagttaccgaaacaattggcggtcaaacaactcactactgggaatcagcagatggctcacgaagcacaactgcccccgcagaagttcaagacgaaacagtagccgcaccggaagtagcacctgaacaatttgaagaaacagcagttgaagaagaccaaccagccgaaaacttcaaaccaatgcctaagaaacatgacatcgatcaaaaagcaattgctttcaaacaactcacaacagattgggctagcaatcaaatcatgtcatcattggaagacttaatcactaaggctttccaacttaacaaataacactcagtattagctaagcggcaagtatcgtaaccaagcgtccccagttttgagtagtttcaaaagcaacactcaatagtctgtcggtgtaacttacggatttacccatactagaagttactaaactatttagaattgtttttttcctattttaaacgtttataaccactccactgctaaaataatttcattaaagtttgatgagttcacccaaaattttgggtgaatttttttattgcttaatgatttttcaaaaataagtctaattttaatagacatttcacaacttatttcatgctcataaaagaacccaaacctactgatagaagcaacttaattgattatcgggctgtattatcggtatccagtctgaactcccttcatgtaattttcatttacggcagactctggctagcctgattacagcagaacacctcaataggtgttatactcttaataacatctttttaaaaggagtctatcatgaaaaaatcagtccgtttaagcaatgccgtccacctgatgaccctgattgctttaaacccgtttgataacctttctagtcagcgcattgctaaaagcatcaatactaacccctcttttattcgccaaatcatggggcaaattaagacagctggcctattgacgagcgttaagggccatgccgaacccaaactaacgaaagctcctgaccaaatttcgctctgtgatatctataaagccgtcgatgatacccggttattgaacatcgatacccaaattgatcctagttgcggccccggacaaaatattcaattatcgcttgctacctattacgatcaaatccaagaaactgctgaacagcaaatgcaagccatcaaactagccgacattatcgaacaatatcaacaacgtctcgttgaaaatccagaattaaaactttacgaaaactaacacacaaaaaggttgggtaaattgcccaacctttttgtgtgttaatcctcagcggatacccggctgatgccgcactcttttcttttaaacgtgctctatcagccaaccgcttccggttaaccctgaatggcaaacaatcgctaacccggttattcaccattctgtgttaatcctcagcggatatccggctgatgccgcactcttttagatttgctagtacctttactaagtcatacttaactgcaataccgcggtccattaattcacgtggcacaatcgcatctttgggattaacggtgatatatgttgcttgtggattttggtacgttagattcataaacggttccttaataaacatcggtgtcatcatacccacacctagttctaaatagaccgtttttttaccttcagctttttgaataaattgacgatactttgcgtattgattgttgtagtgctgaccttcaaggaattcataaccacggacccattccaacatttcagcaccacatttagggcaccgcggaattaagttttcgggtaaatggccattttcaatttgcggaaataattggtcaacaactgtctgattaggatagacttgatcatgacatttatcggcacattgaaaataggaccagtcaccctgaatcgtggcgacatctttatctggaaaagctttcgagaattgcacgtcttgattcgtcgttatcaaatcatagtctttaccctttaaaatggctttcaagtcctgatacggttggtaaactggttcatgtaaaacaaaatgaattaaagacagcttaaagccccataaatcgccgggattataccaatcgggaccagccgcagccgacatgccggctgcggctcccacgatgacgtaatctgcctctttgagcgtcgttgccattttttgtagtgttgcttgatagtctaaattagtcatttttgaggagctccttaaaattatcatcgattgatccagcaagaccgattgaccgttgttcaatggctgcgggaatattgatttcgtgcggtaaattcaacgtgatgtaacggtaacttagactttgcgccaccaattgcatgaggagcgccttaattaactgattattagcaccaattcctaattccagaatcaccacgttttgtgaacgatacttttgaacaaatgcgttaaacttagcttgttgcttttgaatcatcggcattggattttgattgttaccaaaattaccttccacttcaaaaatccgttcttcgtcaaatccactcagttgaaaatgcatgttgccatttgatgtgacaacaaagtattcatgaccgcccaccaactgctttaaatcgcgaaagacaggtgtactttcatagtgatcaaccatataatcgaacaatactttgtaaaatgcatctctttcagccactgttggatagttgtaaaaagccccttgaagaatattcataatcccgtagcgttcataaaaagtcccaaagtgggtcataaacgcttcgtcgtgtgcaaaaatattgtaaccttccgtaattgatagcccattaccagcactaataatgacggcatccgcattgtctagccaattccgtgctgttttaaactcgttcatgctgctctcctttggtgtaataaataaaataacaacaatatcgcatattgtacactgttatttttaaaattacaaccactgacttttaaaggtccaaaaaaatagcgtcgacaactgcgttagttgtcgacgctatttttttgcctatcagtcataactgactgttgtcgcactctttaattaataactcccgaatacgtgggttgagaaccttttactgccggctgctcggcctacgtaagcttgcatcccctctgcagacgagattgaaatatctaatggaatattttgtggtaaatatttatcagcagcggttgcaatgtattgtgtgaaactcatgatttctgtttcactgtagaattgtgtattaacggtgatgttcatcccagccaatacaccatcttcatagtgtgcttgagccgtgacaccactcaagttcgggaagaaggtttggacttgttctttaaaactagtaaacgcgtccgcatcactttgattgaccgctttttcatcattaacgagtgggaaaacttggttggcttggttcattttgtgccatgaatcaatcgttgtactaccgtttttgctgaccccataagcgaagaaggttccgcccactaaactatccttaggtgcttgtttgtaaagccccaccacgatggttgtcttactcaaaccttttttctgccgtaaacgcgttaagaccttattggccatttgtttaccttgttgcgccatcatggcactagaaattttggtttcaaaagtagcaccatattgttccttggtatagtaatccacttgattcatcccaagaccaatactcatcccttcaagcgcaccatctgcccctaagaagtcttgttctaagatttgttggagatacagtggattccgcttatccggttctttttcaccattatcttctggatttaagccaagtgtattatcttttgattgacgtgccaaccatttttgcgcttccgccgttttgatggtttgaccttcttggtagaggtatttatcagtagggaattgttttttagaaatgtttaataagccactttccaaactcttcacatcaaatgccgtgttactttgttgtgtggttaatccacgtgtctgacttgtcttgtattggttattatcaataaccccttcatacatgctgtcagtcactttcccggtcgtttgtagctttttagtcgacttagttgatgatgacgaactcgaattgctttgtaaacttgtacaacctgccaacaataaaaccgttgcggctgcaactacccataatttatactttgccactgaaaatggcctccttataagtcctaattgattcgcttattgcgccaaataactatctaggtctgcttcgttgataattggaatctccaatgcttgcgccttggttaatttactgccggcatcttctccagcaatcaaaatatctgtttttttcgaaactgagccggtcactttagcgccgttatcttcaagttgttgtttcaactcaccgcgggtatattgcgatagtttaccggtcaagacaaccgtttttccgttaaagtaactatcactattttcagcttgtgcctttgtcaccccagtataggtcaggttgacttgcacttcagccaattcacgaattaaagtttgtacttgatcatcagcaaaataagtcgctaagctatccgcaatcgtctcgccaatcgtatcaaccgacataatttcttcttgatcactggccatcaaagcctccatcgtcaagaaatgttccgctaataaacgggctgctttggcaccaacatggcgaatccctaatccaaataataacctttctagcgaattctggcgactagcttcaattgcatttaacaaattattaatagatttttctttaaacttatccagttgcgcaagttgatcggccgttaagcggtataaatcggcaacatcatggaccaatccttgatccaataattgggcaataatccgtggacctaagccgtcaatattcatcgcatttctggaagcaaaatgcgttaactgttccttcacttgtgccggacacattgggttaatacaccgcaatgcaacttcttcatccaaatgaaccaattcatgaccacacgaaggacattctgtcggaatcacatacggttgactgtcagccggccgtttagccagtactacttgtgaaatttctggaatgatgtcgcccgctttgtgtaataaaaccgtgtccaacaaacggacatctttatcacgtaacatatcagcgttatgcaatgaggcgcgcgcgactgttgtaccagccaactggacaggatccatcacagcggttggcgtgacaacccctgtccgaccaattgtccattcgatgtcacgaacaatggttgccgcttcttcaggcgggaatttataagcaatctcccaccgtggcactttaaccgtattaccgagttggcgttgtaaagctaagtcgttaacttttaacacaaccccatcgatgccgtattctaagtcatcccgcgttgcttgatagcgctcgataaaggtctttatctctgtcatattatgacaaacttcagcggttggattgacgttaaagccgagttctgcaagcacttcaagcgcttcgtgctgggttgtcgcttgcacatcgtcaaaggtgacaatcgtgtacataaaggcactcaaattccgctcagccgctattttggcatctaattgccgtaaactaccagcagccgcattccgcgggtttgcaaatggcggttggccttctgcttcccgtttttcatttaatgccgcaaaagaggctttgggcatgtaacattcaccacggacctcaatagagactggcttggttaatgtttgcggaatcgccttgatggtcttaagattctgggtaatgtcctccccaatcgtcccattgcctcgcgtcgcaccacggacaaattgccctttttcatagatcaagtcaatcgcgagtccatcaatttttaattcgacattatattcgatggcatgctcaacgtttttttgaagtcgattatcaaaagtcgcgagttcttcctcagaaaaaacatcgcccattgataacatcggtacttcatgcgtcactttcttaaagccaggcagaacttgatcaccgactttttgagtgggcgagtcattagtaacaatgattggaaaggccgcttctaacgtttctaagtcgcgatacaattcatcgtacacgtgatcttcaaccactggggcgtcctttgtgtaataggcttcgctgtattcagctaatgtctggcggagttcttgggccgccgctgccgcttcagtttgcgtatattgatcgattggtttagctaatcccataatgaagactcctcactgtttatgatttgaaacgtgctttttaaagctgactcttgtgcttagcttcgtattgcaaacgaccgactttgtcggtcattcacaacactgtgctaatgctcagagtcaaatccgctttaaacacactctgttttgaaacgtgctttttggttgcaacaacttccgcttagcgctactcgtcaaacaactgcttgcagcagttattcgccgagttgtgctaatcctcagaagataatcgtcggaaacgcactctattctactttttcaattggtgcgaagcttgctagtagtcttttaacgccttgttctttgaaggcgatatctagttcttggtcgttgccggtcccgttgaccttgacaactgtgccaatgccccacttcttgtgttggactttttggccggctgtccaagcaccactgttatcgccgccagttgtgtcggcaatcttgtgactcgtcgttgttttatttgcattatacgttgtagccgttgcgcgtgcataacgattgctcttaccaaatggcacattgcgttctggaatactgccagcattgccatttgcgtaatccaataatttatcatcgatttcgccgacaaatcgggacgcttggttactttgttgacggccgtataacatccgtgaataagcgttggttaagtacaatttgctttcagcacgggtaatcccaacatatgccaaacggcgttcttcttccagttcgtcttcttctaataaagcacgtgatagtgggaagatgccttcttccatccccatcaagaaaacaactgggaattcaagtcctttagcagcatgcaaggtcatcatggtcacttcactggcttcttcttcgactgaatctaaatcagagaccaatgataattcggccaagaagtccacaaataaatcactgtcatcttcttctggttcataatgttcgtcgaattgtttggtaactgagagtaattcttcaatattttctaaacgactttgcgcttcgagggtgttttcaacttcgagcgcttttttgtagccagtcttatccaataattgttccgttaattccgtcacgtttaaaaattcgcgcatcttcgctaagtcaccaatgacgttgccaaaatcgatcaacgtcttgcgactcttacctggaatggttgagagttccgcattttgcgctgcttcaagtaatgaccattgatgatcatccgcgaattgcgttaatttttcgagagtgccggggccaattccccgtttcggactgttaacaacccgttcaaaactcattgaatcagacgcattcacgactaggcgtaagtaagccaagatatccttgatttctttacgatcgtagaacttatgcccgccgaccatcttgtatggcatgttggctttgacaaacgcttcttcaattgaccgtgattgggcatttgtccggtataaaacggcaaagtcgccgaatttacgttggttcttttgcatttcttcttggatcttcgtaatgacaaagagtgcttcgtcacgttcactttgaccccgataataagtaattggttggccttcgttattttcagtccacaattccttaggtttacgatattgattattgttaatcacaccgttggctgcttctagaatcgttttggttgaacggtaattttgttccaacatcactgatttagcatctggataatcatgttcgaagttcatgatgttgtccatgttagcgccccgccaaccataaatactctgatcggcatccccaacaacacagagattcttgtatttctcagctaacatgttaaccaatgtgtattgcgcttcattggtatcttggtattcatcaacgtggatgtattggaatttttcttgatagtgttcaagcgttggtttgttttctttaaataagcggatcgtttgcatgattaaatcatcgaaatcgagcgcttgattttgttggagtcgtttttgatattcggtgtagcattgggccacaattttttcgaatggtccgtttgctagacccgcatagtcgcttggtgtttggagttcatttttggcgttactaatcgtgcctaaaatcgcctttggttcaaacttcttcgtgtcgatgtttaaatcccgacaaacatggcgcattaacgtcaattgttcagaaggatccgcgattgtaaacgcgcgattgtagccaatttgttcaatctcccgacgtaaaatccgcacacaaagggcatggaaggtagatacccaaacatcttgagccccttcgccgagtaagttaccgacccgttcacgcatttcacgcgccgctttattcgtaaacgtaatcgccagcacgcgccatggtaaaacgtgcttttcttcaattaaataagcgacccgatgcgttaacacccgggtcttcccactaccagcacccgccatgattaaaagtgggccttctgttgtgaggaccgcttcagcttgcttatcgttcatcccttgtaacaattctttttcagacaaattagtcatccttccgtaaatgcaatcagcctatattataccaaactagataggtagaaaaaagcgaacacgacctagtaaaacggattctaatttttcgcaatcttctgccttgacctgggacgcgtttcataaattatactcaccttaatccaagaaaggtggtatgcatcatgattaaatacattttttctaacttagatggtacattgttaaaccaagacggacagctttctgaaaaagatattgcggctgtcaaagcaagcccactcccaatttccttgatttctgcgcgttcaccacaagaaatgcaagctacgattgatcagttagcgttaacgacaccccaagtcgcttttaacggggggttaatttatcaaccgacagatcttttcccaatggttttagcagaatatccacttgcaacctctgctgtcgcaacattaattgccgcattacaatctgaatttagtgacatcagtttaagtgcgtatgacttacaccactggtacacgcagacaattgacgctggtattgaggcaatcgctaagcaaaccggtcaattgccgacgctcatcaattttagtgatcaattgcaaaatccatttctcaagcttttcaaaattcaactgattatgcaaacgacacaacaacgggcaactgttgctgatttcatcaaccaatgccacttgcctggtctttcagtacaacaatcaggtacaatgaccttagaaattacgagtcatgaagccactaaagctaacgcattaaccaccatcttagaaaacactggactaacagtcgctgattgcgccgcgtttggtgaaggtcaaaacgacttagccatgttatcgctagttggccaccccatcgtcatgggcaatgccagtgatcaaatccagatggcgggtcaattcattacgaagactaatcatcacagtggcttcagctatggtctaaagaaatacattactaaagttaatcaaaaagtaggttaggattatgccaacaattcgtgatattgcccgcaaaagcggctattcggtttcgaccgtctcccgtgtgttaaatcatcaaaaatacgtctctgaacctgccaaaacggcaatcgaagcggtcattaaacaactcgattacgtgcctaatagcttagcgcgcgatttaagcttcggtcaaaataaaaatattggggtcgtcctaccgcacaatgaccatccgtatttcaaccaactcttaaacgggattatggatgccgcgttttcaagcggctatcacgttgtgctcctaccttccgaatataatcaagcagtcgaactagattatctcgaacaattaaaacgtaagaattttaccgcactcatttttacttcacatggtattgcactctcagtcttagcagagtacacgcgttatggtcaaattgtctgttgtgaagacccggggacccatcatatctcggccgtttattctcaccgtgagcccgcctatttagcggcattcaagtaccttaaagcccacaaagcacagcaaattggtctactattaagtcgtaatttagcgcaaagcccgacctggattgccgtcacgaacgcttatcaacaagttttcaactgccaacctgattccgagttaatggtcggtggcatgcgctcatttgaagatggctatcgcgccgctgaacaactggttgaaaaacagccaaccctcgcttgctattttacaaatggcgacgacattgccgctggtgtccgccaatatcatctggatcatcaactgccgaccccgcttttaattggtcaagaaaaacaattatccagttttttattgcaactgccaacaattgaccatcacttcttcaccctagggcaaaaagcgtttgaagtcgccctcagtaaccatcaccaagtttgtcgtttcgaatcagaatttattttgccataaaaaaagccactttaacctaacttttaggctaaggtggctttttatgtcggatgcttatgcaaacacccgatcaaaaattgtttgaacttgttttaagtgccattggtaatcaaaggcgtcgtctaaatcggcttttgaaagttcactcgtcactttcggatcggcttctaataattggcggaaatctttttgttcatcccatgctaaggctgtcttcggttggaccaaatcataggctgcttcacggctcagacccgcatccactaacttcaacaagacacgttggctgtaaattaaaccatgggtgatgttcatgtcagccttcatcttttcagggaagaccgtcaacgtcttcacaatccgcgtgaagcgattcaagatgtagtccaataaaatcgtagtatcgggtaaaataatccgttcagctgagctatgtgagatatcgcgttcgtgccataatgacacatcttccatcccggtaatcacatgaccgcgaatcacacgggctaagccactaacgttttcagaactaattggattgcgtttatgcggcatcgctgatgaacctttttgacctttagcaaagaattcttccacttcgcggacttctgttcgttgtaaatgccggatttcagtcgcaaaatgttcgattgaggtcgccacgaccgccatcgtgttaatgtaatcagcatgtagatctcgtgggagcacttgcgttgaaatatcttgggcccggatccctaagtgttctgtcacataggcttcaatttcaggcggaatattggcgaaagtcccaactgcaccactgattttaccggcttcaacgccttttgctgcgcgttcaaaacggtcttgattgcgtttcatttcagcataccaggttgctagttttaacccaaacgtcgttggttcagcatgcacgccatgcgtccgcccaatcatcacggtattttggtattcgtaagctttatcttttagaacggccataaaattggcgatatcagcccggattaaatcgttcgcttgtttcaaaatatacccttgtgctgtatcaacaacgtccgttgaagttagaccatagtggacccactttttttcatccgctaaggattctgaaacggcacgggtgaatgcgaccacatcatggtgtgtgatggcttctaagcgattgacttctgccaaatcaaagctagcattcgcgcgaattttctgcgcatcctctgtgggaatatcgcctaattttgcccacgcttcgacagctagaatttcaacttccaaccaagcttgataccgattttccgttgtccaaatggcgcccatttcgggacgtgtataacgttctaacataaacttctcctccaaatactacctaaatgctggtgatggtaaaacgtgctttttgtggcatctttctgtgcttaaccaaatttgccaaattcgcgattgcatcaccaactcgtcaaatccagttaatgctcaaaagataaccgccacaaatgcactctgttttgaaacgtgctccatcgggcatctttctgcggctagctacgtccgtccaacgatcgactgcgttgctcattcgccggcctatgctagtcctcaaaagataaccgcccgctgtcgcactctaatataagtctgccgcttcgtaattatcgattaagggttggatggcttgtccggttgctgtgaccgatccaatctgttgattggtcgtgacgttgtgcaaattaaagtaccaatccggtttgatcttcatctgtgtttgaattaatgaccgttgtgcttcttgaatccctaaggtcatccccgcattattgaggcgtgatgggccgactgccaactgacagatggccttcaaatgatattcatattgcgagaaattcaaggtatgtgtcaagacatcgcccgttgcgtgcggtgttggcataattcgtttcacataaatattcatagcgggtgttaaaaagaattcaaccccaaaaacacctgtatagtctaatttttccccaattaagtgggctaatcgattaatttcagtcgcaacatcttgattaatccgtgctggcacaagcgacattttcaagcgatgatcttcaaactcattttcgatgactggcagtgtcacacacttaccatcttcagttttaacgaccatcactgatagttcttgtgcgtcgggaatccaagattccaaaatataagtccccaactcaagggcagcttcaatgttttcaaggtcactcggttgttgaataaaacgttgatactgcttaccgtaacctttttgaatgggttttaagatacatggatatccgattgaatcgattgcatcttgaatatcatctacatcaacaactgtcgcatagggcggaatattgatatttaaatcactcaaaaagactttttcgaggtaccgatcttgcgtcacagacaacacattactgccttgaggtagataataatgttgtgccagttgttcgagcaccgtctcatctaataattcattcgtataggtcaacacttgactgacttcaccgagttggactaatgtttgataatcattgaattcaccatcgatctgactatcaattaaacgtgcaaatgaggtattttgcatctgcggggtcacaatcgcggctacccgataccccatttcttttgctttgagcgccaacatataggcccgttgatcatttccaataattccgatggtttgtcctggataaataactggcatcatattacctgctttcctgttcaccaaactgtatacccttattatagcgaatttaagcgttgtctgcctaatactttcctccatgataacaaatttttagacaaaaaaagagtgcctctcagcactccgttaaataacatttatttattttcgtctaaaaagacgacttgaccgtcttcaaacgctgcaattcgtgctaaagattccacttgaatgccgcgttgatctaacaattcgcgacctttttggaaagtcttttcgatgacaatcccgacaccttcaagttgtgcgccggcttcttcaataatagaaagtaagccttcaaccgcttgcccgttggctaagaaatcatcaatcactaaaacgcgatcgtctgcattcagaaacttcttcgaaattgaaatgtggttattcactttcttcgtgtatgaataaaccgttgcgctatacatgttatcttgtaacgttaaactcttgtgctttcttgcaaaaacaatgggaacgtggaatgctaagcccgcgaaaacagcgggcgcaatgccagatgattcaaccgttaggattttagtaatcttcttatccttaaataagcgttggaattcttcacccattgcagccattaaatctggatccacttggtgatttaagaagttatcgaccttcaatacgtcttgacctaatacttgaccatcttttttaatgcgttcctctaatagtcgcacgctgagctctcctttgtagcatcgttaaacatcactaccgatagtagtaacgactaataatgttttctgaaattgaattaaaaatagattaccacaaaaaaagcaacacaacaagctcaaatccagttattcagcgatttgaaaagagcctgtcacaaaccggaatttgtggcaatctcttttgagattaattagtagcagatttcccatgatttgtttcatagcattctttattgatcatattggtcgaggtggtaagccttaacgagctcaattaacttcgctggataatcagggtcagtcgcatagccgtcttgttgtaatgcatgggcagcctgctcataattagtggccgcgattacgtgtgcatactgcgtccggttccaagaggtcccataagcaaacaattgtacatggtcaagcatcgattcttgataattgttatatactctaaaacgcgctgttgtcgttacccactgaccatttaaatattccttggtcgtcatttccttggtgttggcctcattatcacccttaataccgaaataattatggtattgcgcagcaagtgagctcttcccccaatcactttctaaaatggcttgcgctaaagtaatacttggtaaaacatgatatttcgtctgtaattcttgggcatatggcaccatttttttaataaacgcttgcttcttagcttggcgcgattgttgttcctgtctggcttgatcggcaagttcttcttgggccttttgtccattataccgaactaataaaacgagcccaattccgagaataaatagactcactaaaacgaccactagccaatcggttgggtggcgtctcttcttagaatagtagttagctgttggtttgcgttttgtcgtcttgcgtttacgtttttttgccaatcctctgcctcaactttatctgaatctattctatattgtacacaaattcattcagaacaccaatctttaatttgtaacccccctttaatttctatttagcgcttttattgctataatattggctgtaaccgattacgatagtaaaggactgattttattgacaacgcttaactggggaattatcggcttaggcaatatcgccaatagtttcgcaacttattttaaccaacctgatggtcacatttatggggctgcttctcgttcactcgataaggcacaagcctttgccgaccaatacaatattccacatgcattcggtagttatgccgacatgctcggtgatgacaacatcgacatcgtctacattgcaaccccccacaattatcacttcgaaagcattatggcgagtcttgaagccggtaaacacgtcttctgtgaaaaagcgattacgatgaaccgccgcgaactcaatgcagcaaaggctcttgctaacgaaaagcacttgatattagctgaagcaatgaccatttatcacatgccattgtttgctgagattgaacgccaacaagtcgctaatcacttgggcgctttaaaatcaattcaagtctcttttggaagttataaagagcttgatccaaacaatcgcttcttcagtcccgcacttgccggcggtgcaatgcttgatattggtgtttatgccctctcatttgcacgtcggatgttaactgctaaaccagaacttgtagcgacgcaatgggtgccatcagaatccggtgttgatcagcaatcaacattacttttaaataatgccaagcatgaaatggtgactgttaccttaaacattcatgcgaagatgcctaaacaaggtgttctcgtttatgaaaatggctatgtcaccgttgacgattatccacggcctgacaaagccaccctcactttcccagatggtcgcgttgagaccattcaagcgggtgacgcaaccaacgcaatgaactatgaactccatgatttccaagaaacagtgcgcggaaatcaatcaaacgataccctcgaattatcaagcgatgtcatggacatcatgtcagacgcacgtgctgaatggggctttgtctatccatttgaaaaacgcactgatctcgattaatccattcaaaaaacctggccaatttggtcaggtttttttagagtattttagtgagaaccaccatatcttttaggcgaatcccattttcatagattggcgtttgatattggtcgaagaagtttttgcgaattcgttcgaaccgaaagccttgacgcaaataaaaaccaatcgctgccaaactaccgtccccagtgccaactagcaatgattgaaacccttggtcaattgcaatcgtctgaatttgagtcatcatttgcccaccgaatcctcgatgttgccattctggccgtaccgcaatatttttaagttctacctgctgatcgttgagtgccatcagatggaaggccccgatgacttgctgctgatcgcttaaggtgtaaaattgcccatgcatcaaatagcgttcaatcatgccgacttcttcatccgctaacaatagatcatccagccactgtcgccgtgctgcgccctcaatcaattgatacgttaacatctccagctcaccacccaatcaaaaaaaggggtcgcgacaaaattgcttttgccgcgacccctgggttaatttttaaattagtttttgtttacgttaacagcttgtgggccgcggtcgctttcttcgatatcgaaagaaacgctttgaccttcttcaagagtcttgtagccttcaccttggatagctgagaaatgtacgaatacatcactaccatcttcgcgagttacaaagccgtaacctttttctgcgttaaaccattttacagttccgttttccatgagaaaaatcctccttgtgtcgatgacacattataaatttgtgtatttctggtggtccgatggaagaaagttcttttggaaacattcgtaccgcaaccattcaaaaagtacaaacatagtgtaacacaggcaacaaccattggcaaccatttggcaataaaaataaaccgttttctatcacggacaatcagcatccgtgtttttagacaagtgttattttatatgttgaatcatgccccaaatgatttggctttttgctttaattacgttaagatagcagtataactttttctcattggagtgcttgcttatgctaaaactattgaaacggctattaccaattatcttcatcggggtgagcctagccgcttgccaaaaaccgatggatactaaacatcaactccaagccgatatgcaaaccgttgaagatgcgactaagcaacaacgaacagctctttcaaccctcgaaacaatcggcgatccagttcctgataactatctcacgattcaaaaaaaatatcccgacgaaaatctattaacgattgaagatactaagattgcgacgactgcggccaagcgcgaagcagcctttcaaagtcttaaagaacaacaagctgtgctcaaaccggtcattaaacgcctcaccaaactggtcaagcaagaaaacgatgaattgccgattgaacaagtcaaagatttaaatcaaagtcttaagatttcgacacttgattatacaaccttggccaccttctacaacgcggccactaaagcatctgatgaattttacagcgaccatacagatgctgatgcagacgaagacagtcttaaatcaccaatcaatcgtttaaatcaatattacagttcagtttatcaacaagccgaaattgctaaggtcaacatgaacacagttgctgcgcatgctaagaaagtgcaaaaacaactggaataaacaaaaaaggagttggacaaagtcacgtttgtccaactccttttttcaatctttaattattcaacccgtggcggaccacaatcgtcggctgtagctacccgcacttgttattgcgtccgtttaaaccgcatgagtggtgttgcgactagtggtgtcaccacagctgctaaggttgcttccattacagcatttaacgcaacaacgccaagcatcacgatgattaaatgggtcggatcagtatgatacatccctgccgcttggtgtccgtaaagcacacgcgttaagccaatcactaaaatggtattgattaaagccccgaaaatcccagctaaagccattgcaccggttttacgaattttagtttgatataagtgttggaacgtaaagccagcaatcatcccagccatcaaccgcggtaaaatagcgataattggattttgaaagattaaaagtgaaagcggatcgcctggagaggtataggctctaaataatgaaatcaaaccccaaattaatcctagaatcgccccttggcgtgtgcccaggatcacggccccaataatgaccgttaaatgaattgttgttacggctggtagcccaggaatgatattaatataaccgaccatcggaataaaactttgaatgattaaaaaagcggttaaaatcgccataatactaatcgtataagctgatgaatttttatgtgtcatcctaactgactcctaaactgaatttattgctcattatagcgatttgtcaccctagtttcaatcatttacatcaagggacaaaaaaaggtaattccaattggaattacctaactgaattatgatgcgggtgagaagactcgaacttccaccgggaaaattcccgacaagatccttaatcttgcgcgtctgccattccgccacacccgcgtaacttgctttatcactttaagccacgtacattagtataagagaaacgatgattgaagtcaattaaaattttactttggagacgattacatgcccattatccccgctaaactaaccgatattgccaaattaaccaccctgtatcaacaattaacgactgaaatgcatgtgctacaacccactaattaccaagctgattacacgcctgagttctttgactggcaacaaatgataactgatccactacaagcagtctttgttcatcaaaaccaagatgcgcaaatcgatgccttttgtcacgttacaacagcccaaacaagtccctcacccttgtttatcgcacaccgctttgcttatctcacaacactgtatgttgcaccagaggcacgccgccaccacgtcgctacacaactgctatcgtccgcaaagcaatggcaacaaacacaagcgctcgattatttagaactaaccgtgttagggaataatccggctgcgttggccctctatcagaagctgggctacaccactcagaatcaaactttacgcgccaactaaaaaaaggccacccctaaacataggggtggccttttttcattgaatttgtgtggtttgataaatcagtcgtccatgacaccgccgacaaacatagcgagccgtattcattcgacggcgacgtggatagacttgcccacagtctgaacatttataaatcacaattttgctcgatttagctgtcttttgtgcagctggtgcatagcgcgcacccccgacttgtgcaagtaattgtttaaactctgcgtctcgatgacggtaaccgcgatgcaacagatgcaggtgataatggcaaagctcatgcttaatcaccccttctaaggtctgtgtatcatgttcggtcaacatctttggattgatatcgatatgatgatcctgtaaatgatagcgcccgccggttgtttttaaacgccgattgaaatttacttgatgcacaaacggccgattaaaaaactgcaacgataaccgttcaatcaattcagttaaggcttgatcagtcatttgcctttggcgctttcattgtcagttgtacgcgttcacgttcttgatcaacactcatcacccaaacctgaacgacgtcgccaactgccacttcatcagaaggatgtttaacaaagtggtttgccagttgagaaatgtgcactaagccatcgtgtttcacaccaatatcgacaaaggccccaaaatcaatcacgttgcggactgtgccttctaacgccatattcggtttcaaatccgccaaggttaagacatcatgacgtaacaatggcgccgtcatctgatcccgtaaatcacgccctggtttttgcaaactacttaagatgtcggtgattgtttcaatcccgacctctaattcagccgctagagccggtacttgcatttgtgcaatcgccgtcttcaacgcatcgcttcctaaagcatcaacggttaacccaaatgatttcaaaatggctttagccgttggataactttctggatgaatatcagtattatcgagtggattgtccccattaataatccgcaagaatccgaccgattgttcataagctttaggccctaagcgtggtactttcttcaaagcactccgcttttgataaaggccgttttcattgcgatattgcacaatgttttgagcagtagttgctgacaaccctgagatatgttgtagcagctgagggctagccgtattcaggttgactcccacactattcacgacatcctcaatcactgtatcgagttgcacagtgagctctttttgcgccacatcgtgttgatattgtccaacccccactgcttgtggattaatcttgatcaattcagctaacggatcttgcaaacgacgggcaatactaatcgcacttcgttcttcaacgtgtaaatctggaaattctgcccgtgctgcatcactcgcagaataaacagaagcccccgcttcattgacaatcacatagaaaatttcccgggaaatagatttcaaacacgtcgttacgaattcttctgattcacgactcgcagtcccattaccgattgcaatcatttcaacttgatatttctcgagtaaagcagtgaattcatccgccgcttttgatcgtttgtcagctgaagctggtttgtgtgggtaaatgactaacttatccaagaatattccagtgccatcgacaacggctaatttacacccagtccgataagcgggatcaaagcctaatacaactttacccttcaatggtggttgcaacaagagatgcttcaagttatcaccaaagacactaatcgcttgttgatcagctttctcctttaattgcttgcgtaattcacgctcaattaccggtccaataaaccgcttataggcatcttcaaccgcagacttgatgaccattgctgacgctgaatcttgtccatacaacagatcttggctgatccgactggcaattacttgatcgtcaatcataattttagctttcaaaataccttcgttttcaccacggttaatcgctaaatattgatgttccgctaccttcgttaaatcggcagtgaaatcataatagatttgataaacttgcttctcatcggctgcttcgtctttaacttgactggccaactgaccattttgccaagtatattggcgcacccaattccgatattttgctgtttcactaatattttccgccaatatttcatgaacaccagctaaaacagcagctgtatcattgattttttgatctggattgaggtaagcttcagcttttgccaataatgcttgttcggttaagctaggtaaccctgcgataaactgcgcaaaaggttccaagccggcttctttagcgatggttgctttggtccgtcgtttttgtttatagggtaagtacagatcctctaaagcttgcagttgcgttgccgtttcaatttgttgtttgagttttggcgttaatttttcttgttcagcgatatttttcaaaatatcggttttacgtttttcgagcgtcgttaagtattgaaatgtgctttcaatttcacgaatttgaacttcatcgaggcttcccgttcgttcttttcgataccgcgcaacaaacggtacggtattgccttcttctaaaagacctaacgttgctttgatttgttgtggtcgatactgtgttaattgttgaatcacaagattttgaatatcaggcatctgattgcactccttttgcttcaattaaaaaaacagcccccgacttgggaactgtcaactttcgccctaagcgattcttgaaatattttggatgtatttagaaatccgttccgttgctttgtcttgattcatttctgaagctgcaaaagcttgcatatcaacggtttgatcatcatgcatgcttgtaattaaatcttcacagccttgaatgaaatcagcgtaagcaccgattaaacgttggttgttccccatcaaacgagcgggcgcaacaactgttttgaattgtgctaagaattcgtgatattgatcaacaccatctctgaagatttgtgctgtcttttgatagtcttgttcgctcatttcggctaacttaccatcagcaacggctgcttttaaaggggtgaaatacttactcatcccttcttgtactttttcagtattatcgattaaatcgttgacagcttggccgtatttggcaagcttttgttgcgttttattcatgtccatcctcctagtttcctatggtttagtatactaatttcccaatcggcttgcaattaaaatattaaagcatgtgtcattaatagaaaaggcatgcttagttcatcaaaggacatttacctcattaaaaaaacgctagcgacaaaatctcgtttgtcactagcgtcgattattacctatcttctcttcaacattctactcgtccacgactgaccaaacattaactttgtcaataagtcgatacaagcgaaaataactaaataaagtaagaaactcaacaaccaattattttgaacgtgagtaatccgttccagaccaccaaagatgaaaagtgatatcagaaactgtaagaatatttgcatacgtaatcctccctacaaaactcactaacataaaagttatttaatcacctttattatagtttaattgacaagcactttacaaggttggcaacaaattatttagccattctccgctggaagaacttcacaatttccacaatcacaatcaatgagaatgaggctgctaggacaattccccattggtgaatatcgagatgtgacacgtggaataggccgtttaagccaggtaccataatcgttgcggctaacaggaggaatgaagctaagacagcccagttgaaagctttattcttgaaaaagccaactgtaaagattgattggtgcactgacttcacgttaaacgcgtggaagagttgaatcatccctaacgttgcataggccatcgttaacgcatcagcatgtgctaagccgctcgcttgatgcactgggtacgtaatcgctaaggcatacacaccaagcgtaatcccaccttctaagagaccttgatagataatcgcttggaagacaccgccggagaagaagtttgacttgcgcccacgtggtttttgattcataatccccggttcagtgggctcaacccccaacgcaatcgctgggaatgtatccgtcactaagttaatccataagatgtgcaccggttgcagaatttgccagcctaaaatcgtcatcatgaataaggtaaggacttcacctaggttagctgacaataaatattgaattgatttttgaatgttggcaaagactttacgaccttctttaacagccacgacaatcgttgagaagttatcatcggcaagcaccatatcactggcgccttttgatacttctgtcccggtaatccccatcccaattccgatatctgcggacttcaaggctggcgcatcattgacaccatccccggtcattgcaacgactttaccatgtttttgccaagctctaacaatccgcaccttatgttctggcgcaactcgcgcataaactgcgtactgactgacttttttagcaaatgtctcgtcatccatttgatccagttcggcacctgtcacaacggccgcatccgcatcttgttcaggtgtaataatccctaaacgaagtgcgatggcttctgcagtatcccggtgatcaccggtaatcattaacgtccgaatccctgctgaatgcgcatcagttacagcttgtttggcttctggtcgttctggatcaatcatcccgactaaaccagcaaagattaactcatcttcaatcgtcggatcaattgttgctggtaagctatctaacggtttatacgctaatgccaagacacgtaacgcttgtttagctaaatcgtggtttgttttgagtaaaaattgccgttcatcttcatctaacggttgaacatcgccattggcatcaataaaatgactcacgcgtttgagtaattcatccggtgcacccttagtggtcattaataattgaccatctttggcttgatgaatcgttgtcatcagcttccgttctgaatcaaacggtacttcacccacgcgtggtgctgctgctagggcatcttggatcacgaaacctttatcacgcccataagcaattaaagccgtttccgttggatcaccaattaactggccatcctctgtgattttcgtatcgttggcaaggttcataatgcttaacgctaaatcatcgcctgccaagtcggctgatgcttcttgcaactgattattggtaaaaatcttttctaccgtcatttgattcatcgttaacgtcccagttttatcggacgcaataatgtcggtactccccagtgtttccacagcaggtaacttccgtaccaacgcatttcgtttaaccatcttctgtgtcccaagggctaaaataaccgtcacaattgccggtaatccttctggaattgcggcaaccgctaatgagattgaggttaataacatgttaattggtgattgcgcgtggcgtaagtagccgaccacaaatacaacagccgcaatgattaaaatcataatcgttaaactcttaccaagttgacttaaattcatttgcaatggtgttgtggtttcaccagcttgatttaacatcccagcaattttaccaacttcagtttgcatcccagtgcccgtcacaaccccgacaccacgaccgtaagtcacattactattcatgaatgccatgttggtccgatcgccaatcccactttcaggatcggttaacgttgcaacagtcttatcaaccggtaccgattcacccgtcaaagccgattcctcaatcttcaaagccgctgattctaacaagcgtaaatcagctgggacgatatcgcccgcttctaatagcacgatatcaccgacaaccagttcttcactcttgattttaacaatctgcccgttacggcgtacatgtgcgtccggggttgccatctcttttaaagcatcaattgcttgttccgctttggcttcttggaaaacaccaaaaacggcattcaagataacaacggcgagaataataatcgcatctggccattcatgtgctaaaaagccggcaatcattgccgctactaataagacgataatcatgaaatctttgaactgttctaaaaaacgaacgaacaagctttttcgtttagtctcagtcaactgattacgcccgtatttagcgagtcgttcagcaacttggtcttgcgttagcccatcagttgttgtggctaaactttttaaagtctcatccgttgattgggtaaagaatgaacttggttgatctgtcattgtcgtgcctcctatagatagatttcggggtaaaaaaagagacctatagagaattcaaagaatcccccataagtctcactaattaagataacaccagaatattgccttgttggtggcgttatcgcagacaagctgccagttactcccttatcgttaaactaattataagacagaaccaatctaaaacgcaagtaaaacattattctgacgtccaattaatttagcggataaacaaaatccagccgattaacgccaaaatgtatcaaaaacagtaattggtaaatgccgcttgtgcgctgtcttttggtaccacttttcaatcttggtagcagcctcttctgccacttcacgaccctctaaataatcatcaatttgattataagtgacaccgagtgctaattcatctggcaatgctgggcggtcttcttcaagatcggcggttggaatcttttcgtaaaggtgttttggtgcctttaattccgccagcatcgctttgccttgacgcttatctaatctgaaaatcggtacgagatcagcaccaccatcaccgaacttcgtatagaaaccggtaattgattcagcagaatgatccgtgcctaaaaccgcacccttcatttcaccagcgataccgtattgcgcaatcatccgcacacgtgccttgatattacctttattaaaatcactgactgtcacttctgtttccgccagtgcttgaaccattgcatccactgacgctttgatattcacacgccggacctgatccgcttgcatgaaatcaatggcagccattgcatccgattcgtctgcctgctcaccatatggtaatcgaacagcgatgaattgataggtttcatcacccgtttcagcacgcatctcacggaccgcttgttcagctaaagcaccgactaatgttgaatcttggccaccagaaatcccgaggacgtatgtttttaaaaatgtattcttttttaaataatcttttagaaaatcaactgaccgtcgaatttccgctttcggatcgattgtaggttgggtctttaaggctgcgataatttcagcttgtaaaggtctcatgattaaataccaccttttttaaatgttagattgctaacttttttgaaacgcgcttccttcaacagctttgtccggcaaataagcgctagcgcacttattcaccagacttcactatactcaaaagctaaccgttgaatgaaccactctgcttagagcgcactctgattttggacttcttctttgactcttctgatttgggccattttgtgatcccatgtgcgttgtgaaaggtcaactgggtaatcttgcgggttcaagtcccgcttgtattcatcccataacgagtcgagattttcactacagaacttcttaatcgcgccaagttcgggcaatttgtaaacgcgttgcccgtgttcaaaaatcgtccgtagaattggccgcgcattaaagtccgtcacagttttattaatgtacgtgtaatttgggtggaacatataaattgaatcttgttccagtggatcttcatcccaaagcgtaatgtaatccccttcagatttaccatcaacttttttagtgattcgccaaacttgcttgcgccctggtgtggaaactttctcaacattacttgaaagcttgatggtatcgaccatcttcccgtcgccgttttcaatcgaaacaagcttatagacagcccctagcgcgggttgatcataagccgtaatcaatttcgtgccgacaccccaaacatcaattttggcttcttgcatcttcaagttttggatggtcttttcatctaaatcatttgaagcgtaaactttagcatcggtaaaaccggcttcgtccaattgttggcgcacgcgttttgaaatataggccatgtcgccactatcaatccgcaccccttggaagttaatcttgctaccaaattcctgagcgacccgaatcgcacttggcacaccacttttgagggtgtcatacgtatccaccaagaaaacacaatcgtgatgcgtttcagcataagcgcggaatgcttcataatcattgcgatagacttgcacgagtgaatgcgcatgcgtcccactggctggaatcccaaaaatctttgaagcacgtacgttacttgtagcgtcaaaaccgccgatataagctgcccgagtgccccataaggcagcgtccagttcttgggcacggcgcgtcccgaattccaaaacaggatccttaccgaccacagatttaatccgtgcagctttcgtagcgattagtgtttgataattgatgatgtttaacaaggccgtttcaattaactgacattgcgccaatggtccttcgatttgtaaaatcggttcattcccaaaaaccaattcgccctcaactgctgaacgaattgttaaatcaaaatcaagattggctaaataatcaagaaaatcagctggataccccacctcatcacgtagataagcgatgtcactttcggtgaagtgtaagttttctagataattcacgatgtgttctaaaccagcaaaaattgcgtaaccattttcaaatggtaattttctgaaataacattcaaaaactgctgtgcgattgtgcaagtcctttttaaagtaagtaagcatcatattcagctgatacaagtctgtatgcaacaaaagactgtcatcagggtataagtttggcatgttaagctcctaattagagatatatttagtataactatatcataaaataaaagaggcatacaaaaaagacggtagaaaaccgtcttttttgtttgagactagaagaaacgccaaccccatttattaaaatactgtgccatggacttcaagaagatcttaaatcccttgaaactgcggtgggatgccattccataaaaatgagtgacaaccgcgtctggtacatataaaatcgtatgaccgctttggttaattcgatcacaaaggtcattatcttcgaaatacataaagaagcgttcatcgaaaccatcaatagcccgaatcacatcagtccgcgtaaacatgaacgcaccagatccatattgaatcacttgccgtcgatccgttaaatcccggcattcataagccgccaagcgtttttcaaatagcttcttaacccatttaaaaggtacaaagcgcagcatataatcgaagacatctagcttccgccgtactaaatgttgggtcgtaccatccggaccaacaatcttcggcgttagcatccctaagctatcattagcatcttgatccgctaaaatccgatacatccgttcaaatgcgttttgatttaaaataatatccggattgcaaatcagaaaataatcggatgccgtcagcttcaggttggcattatgcccatgaccgaacccaagattctcttggccttcaatgatttcaacatcatctgcagcataggcttttaattgcgccaaatactcaggtgttgacccattatcatgaaccaatacttttaccgggtattgccccaagacagttgccttgatactatctaacgtcttaaagacgtattgactattataggtcacaatactaatcgtcaccgttttatccagattattactcatcatctcatcctaatcaatttttgccataaatttttgtaatgccacttgccaggttggtacttcaaaaccagttgccttgaccttcgtcaaatccatgattgaatgtcttggacggaatgctttttgaggatattcgtctgatgttaccggactcacttctacgtctttatccttcaagatttcgctcgcaaattcataccaagtacatgaattgtcatttgaaagttgatacaagccatacggcacgtcgttttgaacagcgtataacatgaattcagccaacgtccgggtccaagttggacgaccgacttgatcactaacgactgttaaatgatcatgcgtcttcgcaagatttaacatcgtgtaaacgaagttcttaccatattcaccaaagacccatgaagtccggatgatgtagtatttgctcattgtatttgcaacggcttcttcaccagccaattttgtgcgaccatattcattcttaggtgcagctggggtttcttctgtgtacatttgatcattcgtaccatcaaagacataatccgtactaatgtaaacaagcgttgcgccgattgcttcagcagcattggcaatgttttgcgttccaaccacgttcactttgtaattgattgacttgccaggttcttcttcagcagcatcgacagctgtataagcagcacagtgataaaccaattccggcttattcttttcgaagtaagttgtgactgccgctgaatcagtaatatctaactcagtagcatctgtccccacgtattcaatttgattttcatctaataagtgccgtaattcggtccctaattgaccatttgcaccagtgattaaaattttcatagaataaatctcctctattttaattcatccttaacaacttgtaatgccgcatgaatcacttgatgcatatcgtagtaacgatattgccctagacggccaccgaagaccactttgggttctgtcaccgataaatcgcggtatgctttgtataagcggttatttttgtcgttattgattgggtaataaggttcgtcaccacgtgaccagttcgcaggatattccttcgtcacgattgttttattcttatcgcctttaccaaattcaaagtgtttatgttcgatcacccgtgtataaggcgtttcggcatctgtatagttaacgaccgcgtttccttggtagttatcaacgtccatttcttcggtttcaaagcgtaaactccgatattcgagttcccctaattgataatcaaagaattgatcaatcataccggtaaagatgactttatcgtattgatcgatgtagtcttgtttcttatcgaagaaatcaacacccgtttcaacatcgattaaatcactagccaacattttttcaatgatttgtgtatacccaccaattggaatcccttggtatgtatcgttgaaataattattatcatacgttaaccgtactggtaaacgacgaataataaatgatggtaattcggtagccttttggccccattgcttttcagtataccctttgattagtttttggtaaatatccgtcccaattaatgaaatagcttgttcttccaagttttctggttctttatcgcccaacaccttgcgctgttccgcaattttagcggccgcttcggcaggtgttgccacaccccataacttattgaacgtattcatgttaaatggcaagttgtagatttcacctttgtagttagcgactggactattggtgtaacggttaaactctgcaaattgattaatgtattcccagatttctttgttgctagtatggaaaatgtgggccccatattggtgaacttgaatgccatcaatttcctttgtatagatattaccagcgatgtggtcgcgtttttcaattactttaacgtggttcccacgtttggccgcctcgtatgcgaaagttgcgccaaagagtccggaaccgactactaaataattagtcatattattttctcctaaatctaaattattatctcaatcattaattaacgagtaactttctttactaatctgacaatatctctgttaattctagttctcaataatacaagtagcaatacatatacaattgtcacaataattgaattaactaccattgttaagaacaaactaggtaacacaattttaaaattcaggacagcaagaacggtcattagaaaagcaagtacatacctaagctgttcatgaactagataccgtaaatctgcttctttacgaaccatgtaaattctcatagaacatacgataaactcggttaaaataataaccgccgttccgccatccgctccccagatattaacacaaatcacatttaaaataacactaattaccgcacccacaattgccggaattgcatattgtttataatcaccattgaccaatgagaattgactgccaaatacttcaccataggaaataaaaatcattattaaaccgacccataacatattattcgtcattggtgtatatgatttcccataaaaccacggtacaaattcggatgcatttaccattagtaacatagtaaacagttgtgcaactaataatgtatagtcaagtgatgtttttaataactgatccactttttcattattagcatgattcattcgaagttggaccattcttggcattaaaatggtactaactgaagtaataagtgttactaacattcgcgcaatccgttgtgattgatcgtaataagttaattggacaggccctgcaatccaacctactagcgtactatcaaaattggtataaaattgaactgcaagctgtgggataactaaaatcatggcttcttttaaaaagattgacttagaaaagaaccctttaaaacttacttttgtgatgatcccctttaaattaagccagaaaataatatttgcaaaaaagatgcttaaactattaattaatacgtaataacctaaatcactaggtttctttacaaatataaaaatcattgcaacagaacatattttaattaaggtatttcgaacaacaacttttctaacttctcctaatcctatgaagacccaggaaatgtcaattgcgaatccaattaaatatggaatattcaatagcaagtatgttttatattcactgaacattgcaaagaacgtatacgccagaatcactaaacaacctactaaaaactgtattttccataactgtacaaagttactacctagttcacctttatctttgtgggattgggcaataattcttgaacctaattgattcatccccatcaaaatcacaaaactcagaaacatggaaatagacgtaatgaatgaataactccctagtgctcttgcacccaagacacgtgctacatacggtactgtgataattggcaatgccagtatcaacaactggtaaataccgttgtagattatattgttaagcgtctttttcataattgctccatatctttcaatatcctagataatacatccacattattgaccgtttttagcgtagttggcttccacggctgctttttctgcttgccaccagtcttcattggtaactttgtgtgcaccgaagaaaatggtacccccgtccttcctaactcgattaaatataaggcgcaattagtccaagacaaattgcataagaattttaatttccattcactacgtcacactcacgctactatgctgctagaagccggagaaaaaatgaaagtcgttagtgaacgtttaggccattctcgaatcagcactacaatggacacttattctcatgtcactcataaaatgcgcaaaaatacagttagtctgatcgaacaaattcagaacgagtaatgttggcaagagcactatcttgaataattcgaaacacaaaaaaatagcagttttgccaaccaacgaaaattgacgttggcaaaatgttggcaaaactgctattttatcactattaaatttttaagaatccttatttaccggctttatcttcatcattcatcttcaaaatggacatgaacgcctcttgtgggacttccaccgaacccacggatttcatccgtttcttaccggctttttgtttttctaacaacttacgcttccgggtaatatccccaccataacacttggcgagcacgtttttccggtaggccttgactgttgaacgggcaatcactttattcccgatagctgcttgaatcggcacttcgaattgttgacgtggaatggtttctttcaacttaccaacaatcgctttgcctcgttcaaaggcaaagtcacggtgcacgataaaactcaaggcatcaacggattcaccgttcaatagaatatccatcttcaccagatcactcgcacgatagccagtcacttcataatcgaatgaggcataacccttggtattggacttcaagtcatcgaagaaatcgaaaatgatttcagacagtggcatgttgtagatgacattaacccgataggtatctaagtaatccatcgtgacgaattcgccgcgtttacgttgtgcaagttccatcacagcccccacataatcgttcggtaccatgatagatgctttaacgtacggttctttaacttctgaaatatttgatgtttctggcatttctgatgggttatcaatcacttcttctgtgccgtcggttaaatcgacatgataatccactgatggtgcggtcatgatcaggtcaagattgaattcccgttcaagccgttcttgtacgacatccatatgcaagaggcctaagaagccacaacggaacccaaagcccaatgcttgtgacgattcaggttcgaattccaacgcggcatcatttaattgtaatttttcaagggcttcacgcaagtcgttaaacttcgcgttatccacgggatacatcccagaataaaccattggttgaatatgccgataaccatcaagggcttctgctgccggattgtcagcaagggtgaccgtatccccaacccgcgtatcttgaatggtcttgatgctggccgtaatataacccacatcaccaaccattaagaagtcgcgtttaacggctttaggcgacatcacaccgacttcagtgacttcgaattctttcccgttattcatcaagcgaatcttatcgccgactttaacagtgccatcaaaaacccgcacgtttaacacaacaccccgataactatcgtagatcgaatcaaaaatcagcgccttcaatggtgcttttaaatcacccgttggtgctggcacgtccgttaccagtttttctaggatttcttcaatcccaatcccgctcttagcactagcaagcacggcttctgaagcatccaaaccaatcatctcttcgatttctgctttaacaacgtctggttgtgcagatggtaaatcgattttattaatgacagggacgatttctaaatcatcgtcgaccgctaaataaacgttggctaacgtttgtgcttcaaccccttgggccgcatcgacgactaataaggcgccttcgcaagctgccaaacttcgtgacacttcgtatgaaaaatcgacgtgtccaggtgtatcgattaaatggaaaatataagtttcgccatctttggcatggtagtgtaattccaccgcgtttaacttgatggtaatcccacgttcacgttctaattccatgtcatctaagacttgcgcttgcatatcgcgcttggcaatagtatccgtcatctcgagaatccgatcagctaatgttgatttaccatgatcaatatgcgcgatgatcgaaaaattacgaatgtgcttttgccggtctaacattcctgcgtaatccattaattgtacctacttcctctgactatcctttaaattataccaagcctgcctcgtaaaagcgaacgcatttaacggctttccaataaaaaagccaaaaccaaacggatgattttgacctttacttcattactaagtcctattttttgtcagctttttgcgccttttctttcttatctttattaggtgtcacttcactgacaaccttcttaactgtgccttcaattacatttttcaaactatctaatcgttcttcgtttgccatatcaatgacttcctttctattttgttcaccttcattctactttttaaccacaatgactgtcaaaaggttcgccttttattatctaaatgctataatttaggcaggcaaccaaatagattgttgcttaattaattgattggagttgacccatatgcaatttatcatgactttttcaaataacgaaaccgttactttttcggaaatggatttgctacatgcttggaagaatgatactacctatttaaacgttggtgatgatcaagccttttatctagatgaaatcttcaatggtagctaccaagacgccattgcaacttctagcgaacaacaactcgctaaagaacgcccaattcttgcattggctggtctattcgctgatgcagattggttaacttttgaaaccaatcctgaaaaatactatcaaacaaaagcaattgtttcactcacaactaaagattaaccgctaaaagcctaggtacgcctaggctttttataattgctttcatattatgtacaatatacaatcgttaagaactgttattcattactttggaggttattatgtcctatttatttttagcgttcttggggagcgcactgatttcactactattctttaaccggcaacgacccagaaaatggcgtcgcgtactgattatcatcatcgccttaatcggcttaggcggttcattaatgccggtggctgctgcgaattccaagaagaccagccaacatcaagttgatgtacgcgaaaacaaggcggcccgtgctaactcgagcgctttaaaaaaacaactagctacaaagaaaacagaggctagccaactgacaaaacaagttgccagtcaatcacgacttgttaaaaagcagcaaaaagcgtctgagtcagaaagagtccgtgcggcttcagcctcaatcgccgctactagtcaagctagcgaggccgctcagcaacaggctgcaattcaggcaagccaacaagcacaacaagctgctagtgctcaacaagttgaacaaatggtgacaattgcccctaattctggtaaaaaataccatcttgatcccaattgccgtggcttaagtcgtgccaacagtactacaaccatgccattgtcacaagcacaagcagaaggctataccctttgcggatgggaggattagccaatgaaagcaacccgtttgataagtcgcgtggtggtaacaatttcacttgctggtgtcggaacccttttgcaacaaccaactaccgttcacgctaccaccttacgtcaagaaaccaagcgcattaatgcgcacaacaaaaaaaccgaacgtcaaattaatgcgcttcaacgtaaaattaaccagttaaacaaaaaactcactaactatcagcaacaaatgcaaacgactggtcctgagcgtcataacacatcagagctcgcggccctcacctaccgtggtgaaaacgaggtactcgtcaataataaccaaccaagcttcagtgctactgatttggctaccgatcacggtggttggcaaacctttagtaatctcgacgcactaaatcgcgttggtgctgcaaatgttcttttaaatcaatcgatgatgcctactgccaagcgcgaaggactcacttggaatccgaccggttggcataataagcggattaaatctggctggctgtataatcggagtcatttaattggctatcaactaaccggtgaaaataataatccaaagaatctgatgacaggaacacgccagctaaacgcacccgaaatgctggcccatgaatcagatattgcttattatctcaaaaaacaccctaatcgttttgttcgttaccgtgtcacacctatttttaacgataatgagctgctagcccgcggcgttcaaatggaaggccaatccgtcggggataacagcattcaatttaacacttacatttttaacgtccaagacggcgttacattaaattacgcagatggcacaagccaaattgctaaataagctcagaaccacgataaattccttttatcgtggtttttgctatctaacattattgtcactagccatttaaaacttaataatatgagctaaacatacgataatgtacttacttaacttttagggaggctattatgcagactaaatcatatcaagttttaaataacttcgacgtcaaggtaattggaattatcctcatgtttattgatcacgtgcaccaaatgttcgccggggctggggtccctggctgggttgattggttcggacgaccagttgccaccatcttcttctttatggcagttgaaggattcatacatacgcggaatcaaaaacgttacatgttccaattactcgttggtttttggattatgaacttgggaagccccattgtccaacacttcttcgaagtcggtaacctcgcactgtcaaacaatatttttaccgatttatacattgccgttttagcaatgtatgggattcaagaaattagtgtcggtcgccgcacgcaccattccaaacaaattttgcttggtggactggcaattattgctcctatcctcttatcattattggcgcttggtctaattgctaaccctaagacaatgatgtttgctgccaatctcgcaatggttattccaaccattatgcttgcggaaaatggccttctcctctacataggagtatttttttatcttttccgaaacaaccggctcttacaatgtcttaccgttcttgttttcgcattccttgacgctggaatcaactccggatttgccttcactggactcttcactagcaatacgcaatggatgatgatcttcgcgattatcccaatcctcttgtacaacggacaaaaaggacgtagcatgaagtatttcttctacttgttctacccaattcacatttggttattattcattcttgcttcattaatgggcgttggcgaataaattattgattctctatgtaagctaaaaactgtaaaaaactcgtttaagtatgtcataatatctttggtaggaagttattaaatttatcataacttctcatctcgtccagaactgacgatgcgaaaagctgataaggagaagggggttttacatcatggttaaatcatatcaaagtttttggtcccggatttttgatttctcaggcacttcaaaccgacctgatttctggtggccaatcatcattaactacattctaggtggtattatcatcggtattattcaaacaataaccggccatccaatttcagaaatctataatattggggatttaggcatctcaatgggtcgtaacatcgtcgtcttcattgtttggattgcaactttatccgttaaaatgcgccgacttcacgatacagaccgctcaggctggtgggtactcattgaattcataccgcttatcgggacaatttggttctatatcctaatgctcttaccaacaaaaacaaaccgttgggcataagcaattaatgtaacagtcacacgtgtggctgttatttttttgcaaacaaaaaaggcgattaacaccgttacggtagtgttaatcgccttttgttaagcgcctaattctgcttaacaccttgttatctaatggagccggcgggggttgaacccgcgtccatgcgcattgccacgtcaatctctacactcatagtcgaacgatttaggagttcgctagtccaaaacgccgtccgacagaagctcggatgaactagctagtttgcaaatctcttttaaacacctcaaacggcagcgtttaacgtaacccaattaatttgagacccggatctaacccttgggtgaagtcaggcggatcacgctatgctggtgtttaggcagctacagcgtaagaattgttattgtttgcagttataattaactgtaacgttgttaacgtagacgtaacctacgaagtgcaactcacgctcacctacacatgtcgaatccgtaacggccccgatatgcaaatactagtttagcatatcagccagtaatatgaaagactttaaccctatttcaccactaagcgtttcttaggaaaccggtcttttaaaaaggtttgtaatttttctaccgtcgttttaaagcgcaacttggcaatccgaatttcaccgacataaaaacaagcttcgactaagtcaccttgtgttagtaattcaatcttagaaatcgctgcaaattgatgaatagtatttaagtttgcaatcaaacttgttttggttaaaccacgaggccaaaaagcaatcacaattaaaattacaacagagccgatacctgtgatttgatcgctgagcgttctgcccatcactaacgttaaacctagtaagaggattccagcacaacataaaaaaatcgtccatagtcgattccgttttgcacgccaaaccattttcgtttcaacaatcagccagataatgagcaaggcaattgccaataagccataaaataatgtaaaacctgtcatattcccattccctccactaaaaaatgaccagccatgcgctggtcattttcactgatgccttagacgtggccaatttcaacaacgtctctggcaatcattacttcttcattagttggtactaataatactttaacgcgagaatcgtcagcgctgatgacgcgttcttgagccatcacgttattgcgttctggatcaactttaacgccaaagaaactcaagcgatcggcgatgcgttggcgcattaagatgtcaccttcacccattccggctgtaatcactaggacatcaagaccacccataatggcaacgtatgaaccaacatacttgattaaacgattgacgaagatatcaattgccaattgtgattctggacgttcttcacgcgttttttcaagatcgcgcatatcaggagataatccagaaatcccataaatacctgatttagtattcaaaatatcgatcatttctgctggatctttaatgtttaatttttccattaaaaatgcaacgagtgatgcgtcaatgtcccctgaacgcgtactcattgtcacccctgcaagtggtgtaaagcccatggatgtatccaacgatttaccgtctttaatagcagtcactgaaacaccactaccaagatgcatggtaatcatctttaattcttccaatggtttgcctaacatttcagcagcacggtgggaaacataccgatgactagtcccgtgggcaccgtattttcgtgctccatacttgtgataatattccaacggcaaactgtaaagataattttcttcaggcatcgttgtatggaaagatgtatcaaaaacagcaacctgtggtacatcatgtaaaatcttgcggaaagcacggataacacctgcttcagcaggattgtgtaatggtgcgtattctgacaattcttcaatccgttttaatgacgcttcatcaattaatgcggatgacttaaagtcttccccaccggcaacgacccgatgaccaatcccactaatttcactatattcattgatgattttaaattcgattaacttcttcaataacaaatcaaccgcaacatcttgcgtcttaatatcctgggtcattgagaatttttgaccatccccgtatttaacggtaaagactgaatcggataatcctaaacgatcaaccatcccttgtgcgacaacttgttcttcaggcatgataaataacttccatttaagggtagaactaccagcgttaattgctaatacttttgacatctaatcaccttttctattcgattattgtaaattatctttatgccaagtccggatcttctgtagatacgttgcaaacgccttttgatcgttagaatttggaaattcacctaataaaatttggtccacttgtttagccccggcaccttgtttttgaaggactaaaattgctttttgaccttccttagtcttaaacaagtttgctggtaaactcaataagccttgcaaatagacatgttttgtcacccatttaatcagttgcttagcttcatccgtttccaaaatcacatttggtactaggaaaaagccatagccgccttctttcacataatgcatcgtttgttcaatcaacaagtgatgtgcatatgaatgaccactggcagcgtgggtttcaaaatcagccgcccgttcatctaatggataaaaaccaattggtagatccgcaacggcgatatcaactggtttaaccagtagcggttcaatcgcatcctgatggaaaaaggttgttgaatgcttctgcaattcactactgatgcccgcaatttccaacaaactatcatcattatcaaccccaaaaccttgcacggtattccccgttagtttttggatatgattgattacggttgccaataagttccccgttccaacaactgggtccaaaattgtcttgatttggtcagcaccaccaaaaacctctgccaaataagctacaagatagccgatcgcatctggtgtcatttgcttgtttggttccactttaacttgacgcaaacccttgagcgttgccaactgtaatgcttggcgaatttcttctgcttcaaattggttgagattaaccgccgcataaagcggttctagttgtgcaacagtggcagcatctggtaagccgtcttcaacctttacgcggccaccatctgcaatattagcaatggtctcggtgagtgcatccaaataggttgtttctaaattcttttcaattaattgtgttgtttgatcgagttgatcaaacaacgtttctacagcactcttaggcaaaatagccacctctattcattagattcctgttatattctatcggtattctaacggcaaagcaagtaatacaggtgggtatacctagaattataaatcatagtaagcgctttatcaaatagaaaatttatccttgatctgtttcattctgatctggaaactgttttcgataaccattgtttaactcaatgatgattaacttgtgttgctggtcgatacgactcttaccgatgttagtctttataccttgaattgactgagtttgccgcgctttatttgttaatttaagcaagatttgcgtttggtaatagttagtcaaactgacgtaactctgttgttgctgttggtaactgtgggtcacaatcaacaacgcacttgtcaccaagctcaacatcaaaactgcattcaagagcgcgactgcagagcgtttaatctgtatttttcgtgtcatgttgcgcctccaaaaaacattcatgttgataggctgtcccatcgcttaagcgcgcttcgagttctaaaaaaggttcatgatacaccatttttaaccgcgagaccccatcaaacagaggcatataaccattcttcgtactcgaaaccaccagttccttcttagttttcgttaaggtatagcgtcgtttcgaatctttagcgacggttaattgctgttcataattcgcctgttcaattgaaataaattgagcgtcatccagaaaacgatcaagttcaatcatactaatgtgccaattaatattctgacgttccatctgggttaattgcgttgtgtgcgttagtgttttagtggttgccaatattaattgactgctcaatatcagaataacgagagctacaaccatttcaatcagtgtaaatccagagcgtttagtaacaataccattgaagtgcaactcgctcacccgctttatttgtgacataaatggcctgttttttggtgacgacttggtatgtttcccgttgcaactgccattgtgcttgtggcggctgctcatttgccaatcgattggcagccattgccattacagcatattctgtagtagcacaccgccgttgaacttgatgtgctttaaactgccgtagactcattgtcaaggtcaagcctcccatcaggagaagacttaacgccacgatttgttctattaatagaaatgccggtctacttcttaacatgtaacatcccccacatcatctggacccgatattcataacggtgcccatcaattttagaccgacaaatcaatgaccgcggtctagcagctgagtcatgattaaattgaatcctaaaccatgtttctggatcgacgcacatcaatgtttctggaatcgggatatccatactttggtattgtggatccgcacttgtgtaatgcaacgtgtggttggtttgatcccaagataagtgcacattatgcggctcaacagcgacatattcgcgagtcgcatgccaagacgcttcaaattgttcaaaaaataaacgctccgcctgccgtgcacgataatctcgaatatgttgcaacgcaaataaactgactactccaacaatgaacaaaacaagacagctctcgattaaagtgaacgccttattttgtattttgaacaactttattatccttaattgttatgccgcgtttttcagcttgtttaacctgattattggttaaatatttttcacctgatgctaaatcggctagactcgacaccgttttaccgtcatcctcagctaattcaacttgtgtttgaatcgttgccactagagccgtatccgttttttgctcagctgtctctttctgatgcattaaattaggtgcaattaacaagactaacattgctatcacagctagcacaacgaccatttcgatcaatgtaaatgcatttcttttcttcttcatgaaattccctccattgtatgatatagcggtaataaaatactgagataggtacaaataatgatgatcccaattaggataaacaagagcggttgtagccaattcaccttctgtttcaattgccgttgcagttcatcgtatttaatgactgcaagcagatcaacctccttggccatctgttgtaacggacttcccttagcgagcactaattgcagttcaggtggataaaaaacgccatccgctaagttcgctaatagcgtgccccccttttggacagccgtttcaagttgttgcattaattgtacaagccacgatgttttcgccaaacgatgtgtaagctgatgcatttcggccaagtttaagccgttattcaggcaagtcgctaaatcaaataataagcaatactgatagtaagcctgcaacgttttaccgatgaagggccatctaaatgccgccgccaatcgttgtaatagcggtcgccgatgccaacggaataaatacacactaatcagaccaccagccataataacgaatgtccccatcactctaaaaaatagttgtaatggtgatgtcgccgaagttgttgggttaaactgcgcgatttccggaaaaagataaatctgcatcatcccaatcaacgccccgagaaaaaggagtagaaaacagggataggcaattacgccaactaactctctacgccgtttctgttgaattcgctgtaattggccaagatgtaacaaacactcgcctaagtttccctgcaactcagtcaattcaatctgtgcaacaaggtgtgttggaaacgaaaccgccgctaagcttggtgctagtcgttttcctgcttctaacccagtttgcacctgatgcagccactgcttttgtgtcggaaaaacaatcggcatgaactcaagtgcttgttgtaaagaaaaaccattttgcagtaagcgccctaacagcaacataaattcagtattgaattgaacagtggttttagtcttcatgaacagcctcctccaactgttgtgcagttgctaactcatagtgggccgctacattgtggccttcgaccactagtgattgataggcaacacccgctaaacaagcggttaattgtgagtggctaattccaagatctaatagacggtccatcacccccgttgtacttcgcgcgtgaatcgtacttagtaccaagtgaccgctcaacgccgcagaaaccgcgtgttgggccgtctgtaagtcgcgaatctcaccaataattaaggtatcaggccgtaatcgcaaactgattttcaacaatgctgcataggttaaccctgcggcttcattcacctgtaactgtaagaacgctggctgttgaatctctatcggatcttcaatcgcaaccaccatcttatcttgcatgacttgttccgcaagatagtacaaacttgttgtcttccctgaaccagttggaccggcaaatagcaataatcctggttgctgaattaactgcattaaacgacttaaaatctgcgagtcgtcgcaatgataagtctgcccaatgggataaatgaaacgaacaactaaactttcccgattcaaaaaatcccccacggttgccaaccgtaaataaatcaattcgcctgccacctcgatcgctgaacggccggtctgtggacgccgagtttcactgatatccatccccgcttgatacttcatttgattgagccattgattgccttctgacagagtaactttttgtaacggctttagtcctgtcgctaagcgttcaataattgcccaacccgtcgatagtggtcgaaaataaagatcctgcgctttttccgttgcgcacttttgcaaaagggttgttaatacttcggtcatctcgtccctccttcctgactaaccaaagatacgcaaataaccggataattttctgcacaaaaaaagtgcgttgcaattacttgcaacgcacttatcaaacaaattagtcttcttctggtagttcgccagctgtataaacttcttgaacatcatcgttgtcttccaaagcatcaattaaacgttggaattgttctgctttttcaggatcaaccggtgttgtattttgtggaatcattgttaattcagcatttgccaatgtgtatttcttttcaagaatatcacggacatttgctaattccttaggatctgtgtaaatttcaaacacgtcttcttcagtttgtaaatcatccgcgccagcttctagaatgtcttcaaacatttgatcttcatcaacatctaagccttcacgtgcaatcgcaatgtaaccacgacgatcaaacatgtaagcaactgagccagaagcacccattgtcccgccattacgagtaaatgcaacacgaacgtctgaacttgtccggttcttattgtcagttaaagcgtgtactaaaacggcaacaccacctggtgcatagccttcataagtaatttcatcgtagttcgcgccatcgctaccgtcagctttatcaattgcccgtttgatattatctttaggcatgttagctgaacgtgctttatccataattaaacgtaatgcggcgttagaacttgggtcaggaccgccacttctcgcagccatgaaaagctcacgggatagtttttggaaaatcttgccgcgttttgcatcttgtgcgtttttacgaccctgaatattatgccattttgaatgtcctgacatatctaactcctcttttcgattatagaattctggtactaagtcgttttctatgatagcaaattaccatgctaaaagcaatgatagtcgggctatcgtctctttttttgtgtaaaaatccactgtagtgcgcaaacaatcacaatccccgttaatgcgccaacactgtccaacatcacatcttgaaaaagtggcgtccgatcaccagtcaacatttggtgaaattcgtccgtggccgcatacccggttgctgccagccaactaaagataactgctaaaaaaccaccggttacgcgtggccgtagccctaaataactaaaagccgccaataagaaatacgtcccaaaatgggcgccttttcgcacgaaaaactccacaaatttgaaatacccagatgcttttacactctgttcactgcctgcataatggaacgaaaattgacttaaccaagccttaagtggttcattcttgagaaatcgttccaaagtgggcaccgatgtttgttcatgatacgtcattgaagaactgtaaaataagatcgccatcatcaccagtgcagccactaagaaccaatcacttttacgtttaaacattgctgacctccgaaaaactagtatttctctattataccaaagcacacggttgtgacgagcactattattcgttatactactctgaagaaagagggaaattctatgtctgatcaagatcgcttttaccaaccacaaaacgctaaagatgcaatgcgttttgttcaaaaacttttcaatcaatataaccaagcgccactcacagaagaactaattgcctatcatcaaaaattattggcttatctcactaacgatgttacaaccgaagtccaaaaacaagcaaattctgaacaagccgaaaaactgactggaatgattgaagccatgcaagattggttgaagattcgcctcagtggccaaccatatgccgggaaaatgcaacacttcaagttcgttcctgatagccaacaagcccacttcaaaacccgcacgattaaaggtggcaaaaaagcaaataacctcagaacatctgcccgtcactaattcgccttgctattttagctaaaagtgctaaaatatttttgtaagcgtttgggcccgtagctcagttgggagagcgcctgcttcgcatgtaggaggtcgccagttcgaatctggtcgggtccatcaatattaaataaaaccaccctattatttattagggtggttttttcgttcaattatttaattaatcgtatttaaaacgtctgtcagcgcttcacgggttaaaggattaggaaaactgtcctgcttcatttctaataataaccatgtacctaactgtagaaattgttcttcaggcattgcgtattgtaattttaataatcgttgggcggcccctctagtatcgttggcagcaattaaacttgccaattccctttgaaaaggcaattttttagcattttcttgtggaaagacaacctccgactgtgaattaccactttgtttcgataacaaataacccattccttccgcaaaagaatcaacttgtcgcatcaaccagtcttttttattgtccattttcatcccccccaattatgattattttaacaaattattatttgaagaacagtatttaaggtcacgaataattctctaattcgctagcctcaacattattcattttcaaagtgcacaacttaatcgttgccaacttctgcatctagcgctatattattggtaacccattcacaattcgaaggagatttttaatcatgacagataaagtctttacaaaagaaacactcgctcaatataacggtcaagatggtcaacccgcatacgttgccgttgatggcgtcgtttatgacctttccgcaatcgccccttggcaaggcggcaaacattttaaaggtttaacagccggacgtgatttaagcgaatttttcgccaagtcacatcacacaccagccactttaaaacaagccgttcaagtcggcacttaccaagcttaataacaaaaaaatctgccatcaacaaaattgttgatggcagattttttaataattcaatattcctagaaacatcctagctgctgacacgccctagaataatagtgtaattaataaaatcgcgaggactacctgtacggtcactaatccgccggcatatgctaataaacgtttaccttggctgaagagtgcctttaagttcaagcgtaacccaatggctgctaacgccgttgtttcacaccatgtactcaagaaatggcacagtgtaccaaattggcttggaaaaacccgtaagctatttaagacacagaataataggaagccaatcacgtaccatggcactaagctactcttcttcgctaataattgttcgctcagttttgtatcactgactttactttgtttcttttgatgtaagtaaccaaaaccgctgacaacaaaaaccaaacagatgatccgtaaaattttgaataaggtcgctgtgacaaccgttccttggttaatcatcgtcgcactggcaaccacttgaccaactgactgcactgttccaccaattaacacgccacggagttcattattatgtccccacatcaacgttccaataactggcaagagtaacatcaagatggtccccattagatttaccaatgtaatcgcaatgccggtatcttcgttatcggcatcgatgacgggcgcaattgccccaatcgcactcgagccacaaacggcattcccaccggccatcaataaataggtaccttcgctaaattgcaaccggcggccaaaccagatggcaaatccaatcgtacaactcatttgtaacacggtaaacagcacaccatgccagccgatttgttgaatactttggaatgtaattgtcgcacccagtaacatgactgaatattccaataattttttctcggaaaacttagttccggctgctaataccggttgttgcaaccaagtattgccaagtacgatgccgacaaaaagcgcaatcgttgcgccgcctaacattggtaaccataatttagcgatgtaataactggcaatcgcaatcgctaacgataacgcaaagccaggtattttttttgttatattgtccattgctttactccttctcacttgttatcttaaactataccgaaactctttcaattaataaaataaatctttataatagtttttattaagataacgaatagaagtgatgatatgtttaaaattttaacaacttttaaaaccgtttatgaaaccaagaattttacaacggctgcgcaactgctttttctatcgcagccgaccgtttctgtgcaaattaaacaattggaagatgcgctgggggtcacactatttgaacgcaatgggcgccagcagatgacgccgactaagagtgctgatctcttctaccaacaagcacaacaacttcttgatttatgggaccaagatttgcacgcactccatcatcaagatggccagccaaaaacaccgtgccgaattggcgcctcgcacaccactgcaacctacttattgccaaccctgcttaaagcgcatcggccagcccttgaaacactcgccttagatatcagtacactcaactcatcgcagattgttcaagaattgacgcagcacaaactagactttggtttcattgaaaaaccattaaccgaaaaagacttgattcggacgccactacagaccgatcaactggtcctagcaggtcgcccgaatgaaccttggttacttcgtgaacagggttctggcgtctatcactacacgatgaattacgtaaaagaaaataatttaccactcgaaaacgtgatgaccatcaaaagcaatgcgatgattatccaactattaagacagggtatcggccaatcattagtttctagcgcagccttacttgattacccagaaattccctatcgaccattgtcccaacaatatcaacgccaattctaccttgtcgcccggaagaatttaccagcaccaatccaatcatttattgcgttattaatggcgaccccactaccaatcgaataggagtgttattttggaaaactcaccacatatcaaaaaagaattaacgggctacatcatccgtgacgttttcagctcgttaggcttatccatctatattttagcggacacatattttatcgcttacgcagtcggaccaattggcttggccgctttgaatattgatctgcccatttttaacttatttaacggtttaggtctgatgctcgggattgggggcgccacgattttctcaattaacaagagcaagcatcccgaaaagagtcgctcgattttcactcaagttctttcttttgggattttattaggcctcatcatcatggcgctcggcttaatttttattcacccactactccacttactgggtgccaatcatgaaacgctcgccccaagcttgacctatttacgaattattttaattggcagtcccttatttatcatcaataacttagtcttaagtttcgtacgtaacgatagtaatccacatttgacaatgattgcgacactttcacaaagcttattcgtcattatcttcgattacctcttaatgttccccctacacatgggcatgatgggtgctgcgatggccacgatttgttcgccaatcgttagcctactgattttgacacaacaccggcatcacccacaacggttactaactttgcagcacttaaccttacgttttgaaccgacgttcaaagcaattcaactcgggtttccatctttcttaactgaaatgagtactggggtcagcattttcgtctttaacatcgttattctccatctcagtaataactatgccgtcgccgcttacggcattatcgccaacatcttactagttggtctatccctattcaacggtgttgcagtcggggttcagccaatcgttagtcgcgaatttgggaaacatcattgggataatgtcaaaacgagtctcaaaatcggtttgctttccgcactcgggattgcggtaggattatatctcgttttgattggtcttaaattaccgatcatcgaaatttttaaccatgaacacaaccaacaactgattcgctacgcgtctgctggcattcccttgattttcattagttttttcttctcaagcatgaacatcgtcaataacttattcatgaccgccattgcgcaacctcgattgtcatttttcgtggccatcatgcggggctacatcgttttgattgcgagcgtcttggttctttctagcctcttcggattaaccggtgtttgggtgagtgtcccattaacagaaattttaatcttcatcatgggaatgctcatcacgcggaatctcttgaaaacaatcgatcaatagtattaaaaaggtgtgtcacagctcaacttgctgcgacacacctttttttatttaaacatcaattgttgaatcagtgaaatgacggttggattatccggcaattcagtatgggctgcatggtgctggctcaccgaaattgtcatataatcagcaacttgcttttgaaaaatgagccgaccagccgcaacactcgctgctgggacaatcccatcattcttatcgttaattgtgccgccgactgaatagaccactaagtctttggataaatgttgccggcggctctttaaatcagctaacatcggtgtttcctgagtgatgtgctccgacatgccattatatggcgttcccaacgtcagtaatcgcgtaatcttcggtccacttccactacgctcagcataccgcgttaatacaagcccaccgttggaataaccaaccccaccaaaatgcgtaaagtggtattgtttagctaatttacctgctgccaatttaaaccattcggattgtttaaagacgttctcatcaccatctgcattgttttcaaacgcaaccacaatcacggggtgttgtgttttttgatcaaagcgaccactggttttcaagtgaccattttttaataccgttacttttaaaacatggcgtgtggcttgacggttcaatttagcaaaggtgccattaaacccttcaactgttccattactccccggtacgaaaataacgggctggtttgcggtggccgaagttggctgaataatcgatggcaccgttgttggaccagtcgctacatgaccgataaccccaccaatgccgaaacacaagatacaaattagtaaccattgccattttttcatttgtcatcttcctttgaatcaatcaattggtaatcgttctgtaggtagaatcgcttggatatcggctgcaatcggtgctgtaatcgagattgattgttgactgaatggatcttgaaattgcagtcgatacgcgtgcaatgcttgtcgcattatccctaaatcaagcggcccatcatagagctgatcacccaccaatggatagcctaacgcgctgaagtgaacccgaatctgatgcgtccgcccagtatgaatctgaactttaaccgccgtcaactgacccgatgcacccaagtgccaataactcgtccaagctgactgaccatccgccaacaccgcacgccgcggttgatggtcgatttgtccaatcggttcacgaatatcccctgatgctggtaaacccgttcctgaaacaactgctaaatagaatttttgtaattgatgctgttcaatctgcggttgcaatagactttgtgcaatttggtgtttgccgactaaaacaattccacttgtatcaaaatccaagcgcgtaatgatatgcggtactaaatctgttgcaccctgcgcttgccagtaacccttaatgcgattcaacaaagtatccgtttgattagtgggacccggaatcgttgccaagccagctggtttattgaccgccaaccaatactcgttctcataacaaatagtgattggttcgtgactaacagcaactgattcatcggccggttcagctggtaactgcaatgtgaccacatcgccgcattgtacctgatcactaggcgcacttttttgtccgtttactagaatcggttggcctaacgccttaattttggcgtacaatcgttgactgatgccacttgctagcaagaattgtttaacagattgtggttgattgacgtgccatttaatttccattattcatttcccatctttgttctacttactgctattatacgatttatagcttgccaatgccaatcaatggccgaccatattgtttgctaaaagcttcaccaattcgctatgcttaaattagtaagtaaaagtggttgccttttcaggggaacgtgctatactaaagttacttactaataataagtaaaacaattggaggtttcactatgacaaaaaatatcgcagttttaattggtagtttacggaaagattcatttagcaaatcagttgctaaatcattgatgccattattcccatcagattataatctagaaattgttgaaattggtgacttaccattgtacaaccaagattatgatgatttagatcaagtaccagaagcttacacaactttcagaaataaaatgaagacaatggacgccgttttattcgtcacaccagaatacaaccgttcagtaccagccgtattgaaaaatgctttagacgttggttcacgtccttatggtgcaagcatctgggataacaaaccagctgaaatcgtcagcgtttcacctggtgcaatcagtggtttcggtgctaaccaccacttacgtcaatcacttgttttcttgaacatgccaacggttcaacaaccagaagcttatatcggcaatgtcatgaacttattagatgacaatcaagaaatcacaaacccagatacacttggtttcttccaagcaatcgttgatgctttcgatacattaatcaaacgctattaatcgaattacacaaaaaacgccccgactttcgtcgcggcgttttttattttgtattagtttaccaattcgttgcattccagattcgaccatcaagttcaccttggcgttgttcaatccgtaatgctagttcatcactcgtttgttgaagcgccgtataaaaagcttgctcttcatacgttgtggcttgttctttttgtagttgaatttgttctgttaaccaatccattagccttccccctcttcttcgcgaatcagttggacttgccaattcaaatcggttaattccgatcgtttgtcggcgaattgttcgcttaaaagcattaaacgttgttgcgcttcaggcgatgtggcttcagcagcctttttagtcagcatcgcttcaaaccacgctaattgctgatcaaaattgaactcggattgcgtcaaataccgttgataatcgatgaccaagcattgtttatcagtttcttgccaataacccaattgatgaatcgcaagtggtggtaaataggtcatccctagcttacgagccaccaattcatatgggcgcaaaatttcagacagcgttgcttgttcactgccgccagcttgaaaatgtttagccgccgtaccagttgaaacgacaacccctagtgttttcccggctaatggttggcggccattaaaggcaaattgccccgttaaaacggtgtccaaccacatttttaagctcgctggagcagcataccaatagagcggaaattgaaaaataatccgctcatggttgcgtaataatgcttgttcagcagccacatctaacgtctcaagcgcatctaagtggtgccaagtgatggcttccagtggtgctgcactcgcttttaaaaagttttggaccatcgacgtctcaatctcgggatggctgataatcaccaatgttttcatactctaccaactttctatttctaaagtttaattgtacaaaaacatggcgtaaattgcgactaatagagttccaaatattgttcgcgttcccattcggaaacttgttgacgataagctgcccattccaatgatttagaatccatgaagctctggtagagataaggccccattgaatctttgataatctcatccttggctagttccttcaatgcattgtgcaatgtggatggtaggtcagtgatgtgattttccttccgttctgtttcgtccatgctatagatgttgcgatccacaccagcatcaggcaagagcccttgatctaagccagataaaccggctgccaaaatcgacccgattgctaaataaggattggcacttggatcaacactccgtagttcgagacgcgttgataacccgcgtgattgtgggacccgaatcaatggtgaccggttatgaccagaccatgcaacataaaccggtgcctcaaaaccagggactaatcgtttgtaagagttaactgttgggttgttgattgccgtgatggcgcgtgcgtgttgcaataagccagctaagaaatgataagccgtttttgaaagttgttctgtacctttttcatcgtagaaggcattcgtaccatcttgattaaagagtgacatattaatgtgcatcccagagccgttgacaccgtgtaatggttttggcatgaaggttgcatgtaatccatgtttccgagcgattgttttaacgactaatttaaaggtttggatgttatccgctgcatcgactgcatcagcgtatttaaaatcgatttcgtgttgtccgggtgcgacttcgtgatgactggcttcaacttcaaagcccatcttttcaagttccaaaacaatatcacgccgacagttttcgcctaaatcaacgggggcaaaatcaaagtagccgccttggtcgttgagtttcaacgttggtttgccgtattcatctaatttaaagaggaaaaattctggttccggtccaatgttaaagtctttgaaccctttatcttgcatttcgcgcactaatttcttcaaattattccgtggatcgcctaagaatggttctccatctgcggtatagacagaacagattaaccgcgcgacttttccatgttccgcttcccatgggaaaatgagccatgtacttaaatcaggccgcaaatacatatcactttcttcaatccggacaaaaccgtcgattgaagaaccgtcaaacatcattttgttacttaaaactttatctaattgactaattggtacttccacattcttgataatcccgttgatatccgtaaacattaaacgtaagaacttaacgttttcttgatccactaattgcttgattgcttctgctgtcaatactttacgtgccattaatccgtcgccccttaatataatttagatgattgtgaaatggttgactgttgtccaactaagccgccgaccgataataattcgttggccaataaccgccgcgctttttcgtctgataattgtttatcacgctgccgatccgccttcttctgataaatctggcgaatctgtgccatcgtggtgccttcagctaggtaatccttgatttccaacaaacgatcaacatcgttcaacgaaaacaaccgttgatggcccgttgtccgttcaggaaaaacaagcgcctgtgcttcataataacgaatttgacgcgcagtttgtcccgtcaatttcattaccgtaccaattggtaaaactgctaagttgcgccttaagtgtttttcagccatccatttcacctcacttgcgttttatcttaccagtcgcctttcaaacggtcaacatttgatgtcagattttctaacatcagccaacaaaaaaaggtaaaccaatttggtttaccttttaggcattagtcttcatcgatgatttgaatcaaaccacctgcaagcataaacaaatgcgttaccaccggtccaacaaatttaaactggcgcttctttaactctttcgcaagttgcgtactgatcggcgctgatttatcggacacgccagccatttgtgaatcaagcaattgcggctgaccatcaacaaacgcccacaaatacgctgaaaaactgccatattcagtttggatggcttgaattgcccgcgcattttgaatcgttgcccgaatcttacgcgtattacgaatcatatctggttctttttgcaggcgttcaacatccatttcatcaaattgtgcgacttgatcaatcaccatccccaccatttgttgtcgcagaactggtattttacttgcagctactttccagctcaaccccacttggaagaccccaactgttaagagttcaaaccaaatacgatcatcgtgcgttggcgtgccaaaataattgtgataagcctgaaccccatctgtcgccgtttcaaagttgttttttgctgtttcatctaccatcgataaaccgcctgtcctgcgctttctgctggaaccccaactttttccgctaattcgctgtaatgtacctctaaataattaaagcagtcagttgtgtcatgcgtcataaaataaggcagcaaagccatctgatcatcaaattgaacgtgttcctgttgtgcataagctttcagaacttttgccaactgaagaaaatcctggttggtaatatagtatggtgctacggattgctttgtatcaaccgtcacgatggcccgataagcgtgcccgataccttgtaacccgccaatggttgatggtccagcagtctgcatgaccgcataatgaattgttcgaatttccgttgtcgcaagttgcttaacaacttttgcgggcatgacttttaaaacatctgtctgctttaaaaaaatttggcgcggttctaatacaattaaataaggactccgtgcttgccgccaattcgctggcattgtttggccatcactagtaacagttacatccgtcaaagtgacactgaactgttgtgctaaatccacatagtgttgttcgggttgttgcataatccgtcctaaatcggacagcggttttgtattttcgctttctgccaaatgccaatgttgccgcaaccgcccaaagaatgaattcggtttagtgaccgtttcaaccccgagcaaagtattcaaacttacattatacaatttggcaagaacaaccaatgtattcaagtctggtgcacttttatccgtctcccatttagaaatgacttgtcgtgacacattaatctgctctgcgagtgtctgttgagagtagcccgcatccaaacgaaattgttttaattgttgaccaattaacatctaaccacctccaagacttaccgtagcgagaatgacacatttatactagcaacaatccaaagcatctcttaaaaccgaccgctacgattcgttgcacccttatcataccatgcttaacgcacaaaaaaagcggtcaatcaaacgcgaatttgattgaccgcttggcatttatttttcaaagaaggttgtttggactgcccgactaatcgcgagtttaacgtgcgcgtaagttaacccaccttgtaagtaaagtgtatatggggcgcgcaatgggccgtctgctgaaaattcgatgctggcaccttggataaaggtcccggcagccattacgatttgatcttcgtaaccggcaaaatcacttggaatgggggtcacaaatgaatcgattggtgattgcgcttgaacacaaccagcgaacttaaccatatcatccggattaccgaagttcaccgtttgaatcaagtctgttctaggggcatcccatttaggtgagacactcaagcccatttgttccaaaagcgctgcttcaaaaacagcccctttaatcgcattaccagtcacacttggtgctaagaagaaaccttcaaacatcaattgcagattgccttgtgtggcgccttcactggcaccaacacctggcacagtcaggcgataaccaatcatttcgattaatttttcagtcccgacgatgtaaccacccgtttgcgcaatcccaccaccagcatttttgattaaagaaccggccattacgtcggccccgaattctgttggttccgttgtttcagagaattcaccgtaagcattatcgacaaagacaatcaattcagggttaatgtttttgacaaaggcaatcatttccttgattttatcaaccgtgaaactatcgcgatcagcatagccacgtgaacgttggatagcgaccacttttgtcttagctgtaattttggtccgggccgtttcaaaatccacggcaccatcagctaataatggcacaaaatcgaatccaatttggaattcttttagtgaaccaatcccgttaccggccatcccgatgacttcttgcaacgtatcatatggttcgcccgtaagatataaaagatcatcgccaggccgcaacatccccaataaggccgttccaatcgcgtgtgtgccggaaaccaattgcggccgcacaagcgcatcttcagttttgaaaacgtgactatagacggcctctaacttatcgcgtccttgatcatcgttgccgtaaccggttgtcccgtttaaatgcgattcagaaatattttctgcttgaaacgcttcgagcacctttgcttgattattgatgatttgttcatccagtgcttgtaaacgcggtgcgatttgcgtatcaactgctgcgattttagcttgtaattctggtgctaagtttgcttgccaatccattttttaaccactccatttctattattgctgtaaccattgttgtaaatcggtttgaatccgagccaaatcggcttcaggttgttcaaccagattataccaattgaccggaatctggtttctaaaccacgttagttgtcgttttgcgtagtgccgtgaattttgttttacttgagcaattgccacgtctaatgaacagtcactatcaaagtatgggaagaactctttatacccaatcccccgcacggcttgcggactcgtttcacgatgtgcataagccaaccgcgcttcttctaaaagtccagcatcgatcatttgatccacccgctggttgattcgctcgtataataatgcacggtcacaattcaatccaataataaacgtatcataacgtaattcttttggcttttgttgtgaaaacaaagttcccgttgtttcataaacctctaatgcgcgaaccacacgccgtggattcgcactcggaattttagcggctgcttgcggatcaatttgattaagcatctgccacaaagcttcttcagaatgctgatccaaaaaagtttgccatttttgacgaatcgtaaaattctgttccgcatcttgcgcactacccagggtcatatcgtacagtaacgcctgcaaataaagtcccgttccaccaacaaccaagggcatgtgttgccggccgacgatttcagtgacgagttgttgtccttgctgttgaaagtcaaaggcagtgaagcgttgatcgatatccgccacatcaattaagtggtgcggcgcaagcgcctgctcttttggtgtgactttggccgtaccgatatctaactggcgataaacctgcatcgcatccccggaaataatctcaccttgcaactgttgtgcgagttgtagacttaacgctgttttaccaacgcctgtcggaccaacaatgacgattagcttttctttttccatattttcaccacattaattaacgtattttactagctattcgcgcttaaatacgcgataataaagttgtacttgaatgaattgagacttgaggaggctttacctatgaaacataaatttctaaaaggtttcgtaatcggaaccgtttcaacagtcggcgcgattgccggttcactcttggcatttaagaagaccgtcgttgatccaatcgaagaaaaagaaaatcaaattgaagaaagtcgtcgacgtgctaaccgtaagagccattcagctcaccaaggctaagcgctttgaaaagactgcgtccgttgcctgattggcgacggactttttttgtggaaacgtgctttttaaagctgactcttgggattagcttcgtattgcaaacgaccaactttgtcggtcattaacaacactatgctaatgctcagagtcaaaccgctttaaacgcactctgttttgaaacgtgcgccgccagatatactctttcggttagttacataccgtaaacgatcggctctgccgctcatttacggtatgccactaatcctcagagtatgaccatctgcctgcgcactctataaaaagcccaacagttgactagtttttttcgctagtaactcttgggcttttttggtttaatttaatttctttttacgctttgttttgccggtccaaccagcataaccctttttcaaccatttaatgtcggtgaaaccagcttttcttaacttcagtgctgctcggatactgagcgtaatgcctgcatcatataagtagactggtaagtccatccgtagttcacccatattttgtttcaacattggataaggtaagttgcgggcgcctaaaatgtggcctgcatcaaaatcttttttatcccgtaagtcgacaatttgggccttgcgcattgtttcttcaaacgccgcttccgttaattcgccgcctaagcgtttgcgttgaatttgataatatgcccaatcgcccaagaaccaaagtaaaatggcgatcagaataatattaattactacccatacattaattgtccctaatacaagcatcgataagactcccttataacaaattattgttgatcaaattgaagtgcaagtgaagcagccccgataacaccggctacgtttcctaagtttgctaaacgaatcttagtcgtatttttaacatttgggaatgtaaattcttcaaagtaagcttcaacttgtttacgtaaaaattccccagcagctgaaacaccaccaccgataacgatgtaagcgggattcaacatgttcccaacgttagctaatgctaaaccaaggtagtaagaaacacgatcaacaaccttaacagccaatgcatctgattctttagccatgtcaaaaactaatttagagctgatttcttcaccatcatccaacattgtctttaattttgaattaccagcgtattcttcagccatgtcacgtgcaacgcgcacaacaccggttgctgaagcataagtttctaaacaaccttgtttgccacacgtacattcataaccatgtggttcaactgttacgtggcctaattcacctgcagaaccagcaacaccgtgtaataaatggccatcagcaacgatcccgccgccaactccagtgccaagtgtgacaaaagcaacatcgggttggttttcaccagcacccttccaacgttcacctaaagcagcaacgttggcatcattatcaattgcaagcttcatgtgtgtgccagcttcgatatcgcgacgtaagtattgggttgtcttccagtttaagttgtaagcaccaataacggtcccttctttactgttaacactaccaggtgtgcccataccaatcccgatgaaatcagcaggtgtcatgttatataaatctaaatgatgattaatcgattcaatgatatccggtgtaatgtggctaccttcatctaaaatatccgtatcgatactccagcgttgttggatttcgccatccattgtcataattgcaaatttagcagttgtcccgcctaaatcaacgccgattaacttcttgtctgtcatttaaacttctcctccaataaattgtgattaaacgcttcatttttctccaaccgatgttcacgcactaaaaccatcttagcatcacgatacactttgccatcgattaaccccgcatcataaacgtgccgtaattcgatactggtgagctcgatatcccaaagtcgtttaccaagatggacgtaaacgccaaattgttttaaaagttgttgtacatcatatagagttctcatcaacttcacctttaacattatacataaattgattaatgattcatacccagaaaaccaaataaaatcatcgttgcaacataaattaacccactcaccacacggttcagcgggtcaatcttacccactttaggtgcacccagcgccatactacttaaaaagccgccaagtaccccacctaccattgcgtacaatgcattgtgatcgacaataaattgtaatccgattgttaaaaataaaaacagccaatactggcgtgccacttgtcctagcacggattcttctttaaaggcatcacctaacatcaagaagccaccgaatagccctaagatagctgttccagcagtcacggttggtgtatcgagaccaaaaaaagcgcccgttgtaaacaaactcgccaaactgctcagtatatagatagctaataggcgccagtgtcctaataatcgttcaagttgtccaccaacaaaaaacaaaataaccaaatctacgaagagattcataaaccggccatgattgacagatgccatcataaacccaataatccggccattcattagcatgttaaccgatgtaaagccgttcaaccatacaaccggattcaaaaacatcattgcaaacatcaaaatcgttagtaacatcaaggcatacaccacaatcggtgcgtcttgccaacgttctttaaaattagtcatcttttctcctttagacctgaagaacctgatcgagttggatatcgaattcatcaatggcccaatcagcacttcgttgttgtggtttaagcgctagtgcaacagttggcattggatatttggcaagataacgatcataataaccgccaccaaaaccaacccgccaaccttctggactaaatgctagtcccggcacaatcattaaatcagggattaacacctggctaccagctgtaaccactggttctaaagcaccataggaactcgttgttaattcagtggttgccgttaacgggtaaaaagccatttgtcgctctggcaatgtcttgggcactacaacttctttaccggccaaacgaatggcatcaattaccggctgggtcgccatttcaattggctgactcaacgtgacaccgatgattattgccttttgaaacacctcggttgtcattaacaattccaaaagttgtgcttcttgggcatgtttaagcgcaggcgtctgcgcaagcgtttgtaatgccgcaatttgttgttgccgaatttgctttttagtccgcattcaaaagcctccttaataaaaaaaagcccgagcgcgaagcgccccgacttttgatgtgcgtcactattatttagtttcgcggtgtaaagttactttgcgttcgcgtgggcaatatttctttaattccaagcgatctggattgttacgtttatttttgtttgataagtaactacgttcgtgacattctgtacattccattgtaatgtgaacacgcattgatatagcctccaagctgtaagtaaatttctaaaaaactgtttaattcttagactcttagtatcataccattttttatggtatctgaaaaggttattttggaatatttcattcagtaatgttatttaatttatagaaactcgtaatcatttcacgggctagtaacgtattgtagtgccctttatcagagtttaagttcgggaacacaatggcgattgccacttgcggattatcgtatggagcaaagccaaccaaactagaagtaacggtttcgacttgcttacttgtcgaatcgtttggatcttcacgggcaaatgattgtgccgtcccggttttagcgccaagcgttggtttaatatctttcaaggtgtgtgctgtcccccaagcgttggtcccattgacaacgttgtacatcccttttttaacgacattaaagtaactttcgggcgcatcaactgtgctaagcactgtcggcgtggtcttggtaccaacttggccagctgacccatcgttaccagtttgttgaatcgaatccacaaggtatggtttcattcgttgaccaccgtttgcgatggttgaaatgtattgtgccaattgaattaaggtgtaggcatcgtagttaccataagataaatcaagtaatgaaccattggctggctcgccatattcattgacggttggcccttcgatcccggtggcttcacctggcaaatcaatcccagtcttttgtcctaagccaaattgactgaagtagccacgcatcttcgtaaagatatctgaatccatcgttaacgaagaattgggtacatatttggcatgcccttctaacatcgctaattgcatcatgtaaatattagaagaaacttccaacgctgattcagcgttcaatgatccaaacgtcccaactgggtaaacagatttcttaaccggcgttcctcttaaatagattggtgtatccggtaaggtattattggttggcgtaatcacaccatccattaagccccccataacggtcgcccctttaatagcagaccccatgacgaaggtgtgattaatcaccccgagcgcatcatcggcaatttcacctgacttacgatcgttggattcgccagccattgctaaaatagcacctgttttcggattcatcgccacggcataggcaccatcagaatactgagtggctcccgctgcttttgcctgatcatagactttcttcaaagccgcttccacttgcgtttgataagcttggtcaattgttaaatttaaattactccctttttgccctttaaataagacattacttgagagaatctgattattcgcaccaacttcaacttgtgattgcgacttagaaccatgcaagacactttcgtattgcttttctaaataactggtcccaacgcgatcattacgcgaatagccctgtgctagcaaggagttgacgccatcttctggtaacccttgctcttcagttgaaacatgcccaataatactgcgcattgaatcgccattaggataagcccgttcccaatcggtgctgacattaatccctggcaaactcgttagatgttcactgatttcagcaatttccttatcagtcacatccgtatttttaatataaactgtcgataattgataagccccactcataattttgaaaatcgcagcggcttgtttttgttgctcgtttaaccctttaaacgactttttaaccaattcgattgttgattgataaaccttcttttctggcaactcagaaccatcactggcaaccttcgcagatttaggcagttttgcgttccattttttaagattcttggggttactgaggtagtagtcaatctgatcacgttcagttaacttatccgtcgggaccgttaaatattgggttaacttattggcctctgcatacattttgtctgccaagacattcatattcttcgtataagtaatcgccggtttagcagtattcccaactaagacacggccctttgaatccagaatcatccctcgaggcacgttacctgtaacgattttcttatcagtactgttgaccatcgcttgaaaattagcgccctccatcacttgcaggcgtcccaattgcataatcaacgcggcaaataacgcgaagacaacgaataataggaaatttaagcggaatggaatcagtgatttttcacgattttgtttgttttttctcttaatgattttcacagacggtcagatactccttatttagcgccgctctagtaaaagatggcgccgctctatgcttcaaaaagtcgccaagcgaccttttgagcgattttgtgctgtattgtttaagtttagcaaaattatcttaaacaagctatgccaaatctctaaattcaaacgagattatggtatgcttaagcatagtcattaactggttatattttacagcttttctcagttaaaaacggactagcaacctaatttttagatttttttattaattggaggattaccgtgagtcgattttacgcttttgcacgtcgtcattatacattaggccttagtttcttactaccatttggcattttatttatctacggactacttcgacaagtgttcccttttggagggcaaacaatcctgactgttgatctaggccaacaatacatcgatttttacgcttttttcagaagtacgctattgcaccatcccgaaacttttttttattcctttgctaagggcttagggggcgacatgcttggggtctgggcttactatttgatgagtccattcaatctaatcgtcctattgacaccaggaacttggttgagttttggtgtttggctgcttgtccttttcaaaacaggcgccagtggtcttagctttgcgtactacttaaaatctaacaaactactccatagctggtggttaccgacacttagtgttgtctacgccttatccgggtttgcaattgccaaccagtttaacgttatgtggttggatgcactcgtctggcttccactagttgtcttaggcatcgaccggctctttacaggccgtcacttttggctttatccattgagtcttgccgcactcttaatgagtaactattatatgggctatatggtttgcctgtttgtcattgcttattttgcgtgggcttgtgctcattattggcaaacttggcgccatctatggcaacgcgctgcccgcttcatcagtggctcactcttggccggtttactctcagcctggctcctattgccaacttttttccaattgacgcagagcaaagggcagtacaccattcaaaagattcattggaagttcgaatataatccgcttaagatgctttctaaacttgtgattggcaattttaacttcgaccaaatgccaaaaggcgaaccgaatatattcgtcggcagtctcgtattgatttgtgccatcttgtattttggaacacgcaagattgcctggcaagaacggttagttgccttattagtcaccattttcttaggtgtttcaatgtgttatgaaccccttgatttattatggcacggcatgcaatttccggtttggtatccttaccgcttttcatatgtggttagcttttggctaatcgtgctcgcggttcaacggctccaccagcaccttcgatttagttggtatcaactcttgttgccgtttttaatgttgatggcggcttttggttatactgccaaacatctcaagagcttcaccgcgctaagtcctaatcagattaacttaagcatcgctttcttactgatgacatgcttgcttttactcctgaaaaagccgctcaagcgctattatcctttgctcttagttctatgcgtcggtggtgagatggtcaccaacgcgacaatgagtcttaatcaaattagctatgtctcacaaaaagattacgcagattatacagctcatttacaatcagccattagcgcaattccaaataaaaccgcgtttcaacgaattggcaaaacctttatgcggacaaaaaatgacccgatgcaagctgattatttcggcggatctcattttaattcgatgctcgaactgagctatccgaaattcatgggcagcattggcgaaccagctggcgatggcgccgttgccgatactaatcagaccctgttcaccgatgcgttattaggttatcgctactaccttaacaatactagtgggcaagcaacaattccactcagtacgaataagccggacttagcacgttataacttactcaaaaaaaaagatcaaattgcaatttatcaaaaccccaacgcacttgatttaggctttgcggcctctgaaaaagtgcttaaacatcatgtggttgccaattatcccatccttgaacagaaccagattgcggcagacttagtcaattcagcgacagaacagccactcttcacacttcaatttttcaatactgtcacttacaagaatgctaaacaaaaaccaaaactcaacgaaactttcctccgggttgatccgaagaatccagctcacgtcatctataccttcacacccacaacgagtgacccctattacctcacattaggctcaaacctcgaaaaaaatgcggttcaggtctcattaaacggtcacacgctacaacaatacgatactttccgcgatactgtcgtcttaaacctgacaagtaacgcaatcggccaacaacaaaccgttgaccttagcttctctaaaaaggaaatttggctccaaaatattaatttatatagtttgaattatcaagcattgacgcacctaacgcagcaacttcgtgcacatgcattgaaactgaatactttctcaaacacaaccatcaaaggaacgatcaccattcctcaacaaaaccaagtcctcatgacaaccgtcccctatgctgctggttggcatgcaacggttgacggccatccggttaaaatcaaacgcggcttgaagaacttcatcgccatcccgctgaaaaaaggtcaccataccgttacccttaaatactggccaccttatttctattggggtttgacgatttcactaatcagcgccggctttgcaattggtggttattgcagctacaaatactaccgccgccgccacttattctaaccatcaaaaaaagccccacgcactcaatttaaaatgagtgcgtggggcttttttgaatctattcagtatccgttcgtgctaaaatcagtgcattttcggaatagttaatgtttttgcgtaattcatctgcaagttgccatgaaattttatgttgttccaataactcttgaatcgccactcgttcactcgtgagcgctttgattcttaatttttgtaattgacgttcatagatagcggtcttactccgccccccatttttcatgttttcaatctgattccgataccgcacaataatttgataaataacctgacgattataatgacgttggcgattttcaggctgttttaggaaatacgacaattgtttaattcccgccttagccatttcacgttcagtcaattgccactcggtttcacttggtgatttgatatgccgcggccagagatgcgtcaaaaagcgtttgctgattgaccaagcacgatagacttgtagttgcacatgatgccaattaaaactcgtcccaataaccgataacattacttgtttttgccgtaacttacgtttaccatgccgatagcttttagcactaatggccttttcagcccataacaactctaacttctgacgttctccgtcaaatgccacttgtcgcaaaatcaactcttcagcaattaacggtggtagttcgtcacttgtgcttgcttcgctttgttgactctccaaccggcggatcatcaactgatactctgccaataaatctaaagcagcccggttattatcaatatgccgttgggattcgaccatgctcgctgctactttgtacatgtaaatcttagcgtttgtttcatccaataaatcagcagctgcttcatcttctgcggctgcttcggcttcaagatctcgttgcatccctcgcatctcgattggtgctttgacttttgtcagcttaggaattaagacaacggccatcaccagactgacaataatcacgccggccgcaataaagagcattaagccgcgttgaggaaacggtgaaccatccgctaaaacagttggcaccgataataccccggccatcgtaatcgctccacgaaccccagaaagtccagagagcaccgcaattttaatgttttcgcggaatgttttgggattcgtctggttggtgtagagcaagtaagctagtgtccagagtccccgcacaatcaccagaatcaaccaaaccgctaagacgaggagaatttcttcactcgtattaatcagcggattatgcacggtattatgcatagcgacaggtaattcaatccctaaaattaaaaagacaatcccgtttaataagtaaacactgattgaccaagtttgttcggtcactaacttcaactccggtaaaaaatcgaggaagatattccgtgatgaatgactgatgatcccagctaccaccaccgcaatcacaccggatgcgtggaatagatcttcaacaattagatagatgataaacggtgtcaccaactgtaaaatcgtatggaacatcacatcttcaaagccttgttgtagcataaataggcgaataaaatgaatgattaacatgataatcatccccgctagtgcgccaacaatactaatatacagaaaatcgcccgcggcttgttgccatgagaaatagccggtaacagcggcagcaatcccatatttaaagctaatcaagccactggcatcgttaattaaactttcaccactcactaagtgcaaaacccggggcggtaaatcggcctgttctgaaatcgattgtaccgccaccggatccgttggcgacaagattgccgctaacgcaaaacttgcagccagcggtaacgccgggactaaccaatgaatggccaagccgccaattaacgtcgttgcaaagacgaggaaaatcgcattcccaataattggtccgcgcaacgcccatagttccttcttaggaaaacgacggccatcgttaaacaataatggtgcaacaaacaccaacatgaaccaatctgtttttagtggaatcttgacggcaaagactaacgccaccattaatcccaacccgatctcaattaaactaaccggtaaatttggcaaataatgcccgatgatattggcaataatcaccaacgtaattaacaaaataacagcttcaataattgccatcccaacaccctttctttttaaaacgctcatcctgataaaaaagccctgataaaatcatcttttaccatagcttttcatcattgatttaaccttgcttatgttgcccaataatccggacttctggttctaagcgcacattaaacttcgcccagatcgttttttgaatgtattcgatcaacgtcaaataatccgttgccgttgcgtgatcaatattcacgatgaacccggcatgttttttagaaacttgtgcgcccccaatttgatgcccttgcaagcccgctttttgaatcaacggtccgacaaaatgaccgactggtcgtttaaagacactcccacatgagggatattctagcggctgtttggcagcccgcaaagtgttgacctcatccatccgggcgcgaattgttggtgccgcacccgttgccatttcaaaataggcaaccaacacaatactgccgttatcttgaattaaactatgccggtaactgaagtctaagtcagcggccgttaacgtctgtacttgattatcgcgcattaaaacatcaacgcgggtcagtacatcactaatttcgccaccatatgcgccggcgttcataaagaccgcaccgccaacactaccaggaatgccggcagcaaattctaagccggtcaaactaccgctataagctgcttcagaggtttgaataatccctgctccagcttgcgcggtcaccaagttaccttcaactttaatctgattcatcgccgttaagatgatgactaagcctttaatgccaccgtcacgaacaattagattactagcattaccgataattgtgatgggtaatgtcagttcattggcactggccactaattgccgcacttctgcaacagatttggggagtgcgagtaaatctgccggtccacctgttttggtaaaggtgtataagctcaatggttctgcttgatgaatctcgattgcttggtttgcttgtaaaaatacttcaacttgacttgtcacaattgtcgttcccctcaaaaaataatctactcctagtttaacaaagacggcttgaattgaacagccaacactttttttgcgtattattgactagaccgttaaaatggagtttagaaatgagggatcgacaatgaaatttatttcttggaacgttaatggcttacgcgccgttttaaaaaaaaactttatgaccacttttaatcaactagatgccgattttttctgtctacaagaaactaagatgcaagccggccaagttgaattagatttaccaggttatcatcaatactttaattacgctgaaaaaaaaggctattccggtactgccatcttcactaagcataaaccgctcactgcaacttatggtatcggccaacctgaacacgatcaagaaggacgcgtgattacacttgaataccctactttttatttaatcacttgctacacacccaattcacaggataagttgaaacgattagactatcgcatgcgttgggagaatgcctttcaaacttatatcgctgatttatcgactcaaaaacccgtcattttctgcggtgatttaaacgttgcccatgaaccaattgatctgaaaaatgataagaccaatcatcataacgccggcttttcagatgaagaacgagggcaaatgacaaccctcttaaatcgcggcttcaccgataccttccgttatttctatcctgatcaacccgatatttattcttggtggagttatcgattccacgcccgcgacaataatgccggctggcgcattgattatttcattacttccaatgatctccaacctaaattagtcgatgccaagattcacacggaaatttttggttccgaccactgccccgtcgaacttgacacgcaagatttattcgcttaaaataagcaaactttataaaaagcgaggttcaaaataatgaattttgtcgcaatggattttgaaaccgccaacggtcaacagcatagtgcttgctcacttgcccttgttgttgtgcgcaacgatcaaatcgttgatagtttttatacgttaattaaacctgaaacttattttagcagtcgcaatacgcaaattcatggcattcatgaagccgatgtggctcaagcgcccaagttcaatcaagtctggccgcacatcgcaccatttttcacgccaaacaagttagtggtcgcccacaacgcgaattttgatattggtgtgttgaaaagtacactccaacactacgacattccagaaccccattatttagcgttggatactctcaagacgagtcggcggttgtatccacaatttgagaatcataagttaaacaccttgtgtgataacctagcgattccacttgacaatcaccacaatgcactggctgatagtatcgcttgtgccaagattctgattaaagaagccaacgattttggcgttgaaccgctaaaagcggccaccaaattaatcggctaacaaaaaaagagcggttaacttgtctatgcagacaggctaaccgctcttttagcgaatggtggattaaagctaaattgtcattagggcttcgacaagattaacaacttcatcataatcattaatttgttttgactaatgtacgagctttgtttccgctgttaattataccacaattcggttcatcgtgttaacttattttgacttagattgaccaaaactcaagataaagaccgtactgatcacgagaatcccacccacgacttcccaggtgttgaaactcgttttcaagaataaaacagtaccgatagtcgcagctaatggttcaaaggtattcaataaaccagccgttgtcggtgtgatataccgtaaactccccaagaaacaaagattggcgagcgcggtcccaaacaaagcaatgaataagacactactgattgttgccacattcaacggtggaacaccgacccaaaatggatgaacaaatgtgaagaccaccccaccgattaacatcgcccagcccacaatcactaatgttggatatttttggaataacttaaccggaattaatgtgtttaaagcgccggaaaagccaaggcataaactaagtccgaatgccgcgtgtgaaatcgccaaatgcgtcagttgtccttttgtcactaacaaccacgtccccaacaatgcgacagtcactgcaattagttcaacgcggctaggtgctctacgataaatcaccaagctaattaagatgatcatgatggtgcctagctgttgtaaaatcgtagtcgttggtgcattgctggcttgaatcgttagaaaataaaaatactgaacggccgataaccctaatactgcaaataataacatccgcgtaaagtcccgcggttgccgccacactgtaaaaacatcgttcggttgtttaatgagcgcataacctaatagaaataggcctgaaagccccatcttaacccccattagccattctggcttaattgccgtgtcagtgaatagccactgtgatactggcccttgaatcccccaaaatattgatcctaatacggctaagtaaattccgcgtcctcgttgttgttgcatcttaaatctcctcatccatattcattaattggcacatttgcacaaccggaatatagcccgtttctggcgcataaaatccggctgctaattgtgcttcggtcacaaaaccaaaccgtttgtaaagtgcaattgcacggtgattacgggcttgtactgttaactcaagccgtcgcggatttcctatttctcgaaccgacgctaaaaggtgcgccatcaaatcagagccaattccgcgatgccacttcgcttttaaaacagcgatactaacttcactgatatgtgttagcccctgttctgtcggactattcacacgaattgccccgacaatttgctgttgatcaaaagcaagcaataatacatcttgttgcgattcaagaatacttgctatcaaaaattcagtaaataatggtgttaaagtggctaactccgctggtaacgcaacatacggtgtttctttagcgaccgcctttagaaagcataaataagcccgcgcatctgctgcttgcgcgggccgaatgtcaattacactagtctgcaaaactagtacgcaccaatgcttcgtagtgagcgccgtgcggatcaagtactaacgtccgaacttgatcatcgctaacatccttattaaaatgaatcgtcaaataatcgctcggtagttcttcagcaataaattgactccattcaaccaccgaaaccccgtccccatcgaaatactcttctaagcctaaatcactggcgcccgtttcttccaatcgatacacatccatatgatagagtggtaaccgaccgtcttgatactcacgaattaacgtaaatgtcggactcttaatatagcggtcaattcccagaccagctgccaagcctttcgtaaacgttgttttaccagcgcctaaatcaccatccaacaacaagacatcaccggcttggacttgttggcccaactgtttggcaatcgcaattgtttgttctggatcagttgttttaaattctaacatgttctgcctcattctaattgttatctgtgtgtcattataccgaaaaaagccctgttcgcaaagtcaaagacgccagcacaatttttctgtgctggcgtctttgttgtcggtcaattagttttgtaatgcttgagcagccgtaatgatggctaacttgtaaacatcttcttcgttgctcccacgtgataaatcagaaatgggttgattcaaaccttgtaaaattggtccgatggcttcgaaattcccaaaacgttgggcaatcttgtagccaatgttccctgattgtaattctgggaaaacaaacacagtggcttgacccgccacttttgaatctggtgctttttggttcgcaacaactggtacgtatgcggcatcaaattgtaggtcaccatcaatgtctaattctggcgcaatttcatgtgcaatccgtgctgcttcttgaaccttcgtgacttcgtctgctttcgcagaccccatcgttgaaaagctcaacagcgcaactttcggatcgatatcgaacaactcagccgtctttgcagattccacagcaatttcagccaattcttgcgcattcgggttaatattgatggcgcaatctgagaataagtaacgttcgttatcgcgaccgcgttgcataatgaaggccccgcttgtgcgttggacacctggttttgttttaataatttgtaatgctggtcgaacagtatcgcctgttgaatgcacggcacctgaaaccatcccgtcggctaagtttaaataaaccagcatggtgccaaaataattaggatcttgtaaaattgtttgtgcttgttcaggggttgccttgcccttgcggcgttcgacaaaagcggcaaccattttttcaaagtcagctgttggatattcttgtggatcaataatcgttatcccgtccaagttaaatcctttagcagcagcgatttgttgaatatcattcgttgccccaattaaaatgggtttcaaaatccgatcagcattcaaccgtgctgctgcaccaataattcttggttctgttccttccggaaaaacaattttaaattgccgattggtaatctttgcttttaagctttcaaataaatccacaattgcaacctccagtaagcattttattattgctaatgtaatcatacaacgtttctaataccgcgacaagtcaacaatggtaacgcttcattattctaccgtgactgtttgtggtaattgccaattaattggcgccatgccccattgctcaagggcagtattcgtctgtgagaaaggtttagagccaaagaaaccatgataggctgacaagggactgggatgtactgcagtaatgaccgcattttgcgtctcatcaattaaccgccgtttatcctttgccgcgtttccccataaaatgaagaccacatgtccccgatttgacaatgcagcaatcgccgcatccgttagctgttcccaaccttgtttacgatgcgaatttgattgacctgcccgcacggtcaatacggtgttcaacaagaacacgccttgatccgcccaactctttaaatagccatgctgaaccggttgaaagccaacatccgtctgcaattctttataaatattttgcaatgatggtgggactttgacccctggtaaaacggaaaaactacacccatgggcttggttcgggccatgataaggatcttgtcctaaaatgacgactttaacctgttcaaacggtgtccattcaaaggcttggaaaatatggtgcatctctggataaaccgtggtcgtttggtattcctgtttcaaaaaggtatggagctgaccataatagggtttggcaaactctggtgcgagaatcgtttgccactcattgtgaataattgttttcatctgctcacctcattaactagtttatcgtgttttaacataagttgctagaagaaaagtagcttgcatgctaagatagaggtaagtttctaataatacgttttcaggaggaattcctttgatttcaattattgcatctgatatggacggtaccttattaaacgacaaaatgcaggtttcagacggtaacatgaccgccattaaagctgcccaagacgccggcatcgaattcgtggtggctaccggccgcagtcgttctgaagccctccccctaattgacagtgatgacatccaacctactttaattacgatgaatggtgcccaaatttttgattctttaggtaatgaagttttgaatgtgccgattgattccgaaagggtgacagccgtcacagaaaatttacgcgaaaataatatttacttcgaactcatgacgactgccggtaattattcagatagcaaagtcagtcgcatccaaaatgtcgctgatttactcgtcaacctcaatcccgatacgagttataaaattgcggttgctttagcagcagcccgtttggaattaatgaatattaactacgtcgatgatcactatcaagggattattaacgatccaacggttaagattcttaaaatcatcgcttttagcacacagggaatgaccgaattagcaccaattaaggcattttgtgaagcccgcggggatttagttgtaacttcctcttcaagtaataacatcgaaataaaccacattgacgctcaaaaaggcatcgctttggccgcctatgctgaacaaagagggattccagttgagcaaacaatggcaattggtgataacttaaacgatttttcaatgatcaaaacagctggcattggtgtcgccatgggcaatgctgtcccaacaattaaggaacttgcgaactatcaaactgcaactaacattcaagacggcgtcgcacaagcgatttatcacgcgattgacttgaatcgtacagctgaaaagaagtgatctttgatgcctattttctacattaaacaccaggctagtgcttcacgtggtgtctcaaccgtgattgacgatcaagaacaaccgcgttatttacttattggaaagcgtgggattcggcatgacgtattcagcctttactcactcaccggcgacttactcggtgaaattcgccaagtcacaattagcccctcacctgactttgaccttttccaaaacgatgaacggattggtcaactcaaaaagatctggggcgtctggcatgagtttatctatgtcaaacaacttaattggttaattatgggagatttaacgcaaaatcaatatcgcattatctaccatacacaacccatcatgcaagcgaccaccattctagcaagcagcggtccagcctttcaattgactgtcaaccaagaaaaggatatcgtcccctgtattttgattgccgccgttttaaatcattgggcctataaccaacccaaggcactgattcggcgttttaagcctagtttgcgattcgaatagtcagtaaaaaaacgactaatcaaatgattagtcgttttttggtctagctcaagactcccatcgaatatatataagcgctaacatttaaaattaaattgattcttttcttttaaattggtatggttgaatatgcaaacttaaaattaaaggggtcttctcaatgccaactggcgtgattattaattcattatccgtcttatttggcggtctattcggtagtttattgggagataaattatcaactaaatttaaaacagaactcaccttaatcttcggtgttgcttcgatgggaatgggcatcaatgccattattcaaatgaagaacatgcctgcagtcatcttcgcagttgttctcggtactgggattggcctactcattcacttcggtcgctggattgatcgcggtgccgtcttgatggaacggccaatttctaaatttttccgcgtaaaaacaatacgctatcagataccgaatttatttcagcactcgtgacagtgattgtcctcttttgtgccggtgggaccggtatttatgggacattagatgctggtatgacaggcaacaatacgattctaatttctaaatcaattctagatttctttactgctgccatctttgcctgccatctttgcctgcaatcttggctccgtcgtttcaaccattgcgattccgcaattcattatcttttacatcattttcttactcgccaaactcattttcccactaacgaatccaacaatgcttgcagatttcaaagcttgcggcggcctcttgatgctcgccactggctttagaattgctaaaattcgcgaatttccaattgcagacatgataccagcaatgatcttagtcatgccactgagctggctacggacgacaatgattatgccattactttaaaatcaaacaaaaaagacggtcaaattcacgctgaattgaatgagaatttacggttgaaagctgaggttgaacagcggaagaataataagtactggttgtgggcattagtgccaattgtcgcgattcttgctggcaacatgacctcattttcacggatgttcatgcatttttgtagatagttcacgatagattgcatagaaataggcgttaagcagattatgaaaactgcttaacgcctattttttattggcgactgtgacggtagccgtaactgaagtaaattgttaggccaatcaccaaccagattaagaagacaatccaagttgttagttgtaactgggtcatgagtagtaagcataagccgcatgaaagtaaaggaatccatgggaatagtggcactttaaacccttgtggcaattcattataaaatggtaacttgcgcaggaagatcacaccgagagaaacagttgcaaaggcgaataacgtgccaatgttgaccaattcagcaatcttatcaagtggcactaccattgcgacgatgcttgtgacgatggcgaaaatccatgtattcgcaactggcacatgtgtttttgaactgactttggcaaaaacgggtggcaatagcccatcgcgactaatggcgaagatcagacgtgttccgccgtaggtcataacgagtaggacagttgtcataccggcaactgctcccagggcaacaatcccagcaacccagttttgatgcatcaattgaagcgcaaaagcaacggggtcaccaacgttgagttttgtatagtgcacgacgccaacgaggacggtggcaactgcggcatacaataatgaagcaatcaataatgaagcgataatcccgattggcatatcacgttgcggattgacaacttcttctgatgcggttgaaacggcatcaaagccgatgtaggcgtaaaatgctaatgctgccccagaaagaatgccaccagcaccaaatggtaagaacggtttgaagttggctggtttcacatagaaaatggcaacgccaaggaaaattacgatgacagcgactttcacaccaaccataatcgtattaatccgtgttgattcgcgtaagccatttgatagtaagaacccaatcaataacgtaattaaaccggcaattaaattaataccaccagggtggccaggcgtccatgcagtcgataagaaggtaggtaagtgtaatccaaagccagcaattagattttggaagtaggctgaccaactgacggccactgaggcgactgcgaagagatattcggaaataagtgcccaacctagaatccacgcgattaattcaccgaagacggtgtagacgtatgtgtaggcactaccggccaagggaattgtagaagcgaattctgaataacaaagggcagccattgcacagacgactgcggcgagcaggtaagacagcatcgcaccgggtccagcatatttagcggcgataatccctggtgtgataaaaataccggcgccgacgactgcaccaacccccatggcggttaaaccaaaggcggttaaatggcgttctagtgtactgtttttaaattggttcacgtcgatttgttttttggcaaagagtgaatgttgtgtcattagtaactcctttttaagtgagatggttctaattttaatcggtctactgagaagtgtcaagataaaaaaagcgccatgacagtgattgagccgtcatggcgcggattagttaagtgattaaattaagccccagtggcgtaaaccttcaataatgccaccttcagtattcttagaagtaatgtatttagccttggctttagcttccggaataccattgcccataacggtgggatagtctacgaagtcgagcattggtaagtcgtttgtaccatcgccaaacgcataagttgggatgtccgttaagttttgtgagcgaatcaattctttaataccggtttgttttgaacaatctttttcaaccgtatcaattgagttcggtgtgttgcggtagaatgttaagtcggtacttagtgtttctgtataggccttgtcattgtcgtttgttagaatcaacatcatgtagactggatgattcaagtaatagtctggatcaacttcggggacgggggcgttgacaaacttgtaggcatctttgccgggttgagttacagccgtaatccggattgcttcttcattataaaaagcgatggcttcgtcagcagcattagcaattgcgacggttttttcaatcacgggcgttggaatagtgcctttataaacaggttgaccttcatattgaatgaagctcccatttaaacaaatgaatgaatcgatgccggtttttgcaagtgcatcttgaatttcaagcggtgagcgaccggtcgcaatgattggtaggtagttgttggcgcgtaattggtggagtgcaatcgcaacagctgcatctacttcagaatgttcgttgtaaagtgtaccgtcaaggtcgaaaaatactagtcctttataagtcaaaatggggcctcctaaataatgatatctgcttaacatgctatcatgcttagcgataccatgcaaacgggaaccgtgatgcgtttgattttcatcacttcttcatatattattcatccgtaattggtttatctactgtataatatagacatagcaacgtaaaaagagaaggaattctaatgaaaattttaatggtagaagataacaaatccgtatcagaaatgatgagtatgtttttccaaaaagaagcttgggatgcccatttcgcttacgacggcaatgaagcagtggaagcctttagtgtcgatccagagagttgggacattatcacgcttgatttaaatttaccgggtttagacggaatgcaagtcgcccaaaaaatccgcgagttgtcgaagacagtaccaattattatgttgacggcgcgcgattctgaaagtgatcaagtgcttggccttgaactcggtgctgatgattatgtgacaaaaccctttagtccaatcacactgattgcacggattaaagccttacatcgccgtgctgagttgattgatgaacaagtcgaagcagctgaagaaaacttacaacaagcggctgaaaattcagattttgatgtacaaacaacacactttaagttgagttctaaaacgcgtgagacttatttattggacaaaccaattttagatttaacgccaaaagaattcgatttattgaagacgttagctaaaaatccccgtcaagttttctcacgggaacaattattagaacttgtgtgggattaccaatacttcggtgacgaacgaacagttgatgcgcatatcaagaagttacgtcaaaagattgaaaaagtaggaccacaagtgattcagaccgtttggggtgtcggttataaatttgatgattcagacgcagcgcgcgaatgaagcttatttatcaatggatgttggcatttttcggcgtcattatgacgaccattattattgtggggattgcgtttacgcaatattcgacaaggaccgcttatgagagcacctgggatcaactagaaggttacgcggatgtgattgaacgtgaagctttcaaacaggggtctcaagcggccttgtcgacccaattcattattgatagtcaacaaatcctttcccaacaacacgttgggtttaatttctttaacgccgaaaacgagatggtgtatcctaccccggatcctaaagtttcggtcaagaaacaatattggaaacatttaaagaatggccagattcaacggctgagcttaagtcgtgattcgcaccaagtgaataacaataagcaagaacagttagtggtcttcaaacccgttttttacaataacaaactgatttacgtgattggggtggcagcaccactacaaaccgttaaatctggtttgacaacgatgcgcaagaacctcttgattgcctttttactatcgacaatcggtgggattctgttgagttacgtcttagcacggtatcaaatttatcggattaatcgcttacgaaatgcgacccacctagttgctgaaggagattttaatgttcagattaagaatcctggtaaagatgaattggatgatttggccaccgattttaatgagatggtgcattcgttgaatgaatctgaagaggaaattaagcggcaagaagatcgccggcggcaattcatggccgacgctgctcacgaaatgcggacgcctttaacgaccgttaagggtctgttagaagggttgcaatatgatgcgattccagaagagatgcgcgccaagagtatttcattaatgcaaaatgaaaccaaccgactcattcgcttagtcaacgagaacctggattatgaaaagattcggactaaccaaattaaattgaacccgcaaacgtttaatgcggtggaagctatccagaatattcaagagcaactcgagaagaaggcgactgaagccggtgatacgctcatcttggacgcccaagagaatgtcccaatctatgccgactatgaccgttttgtccaagtgatgtttaacatcatgcaaaatgccattcagtttacagaaaatgggcaaattacggtgactgcggaagctggtttccacgaaacaatcttaacgattagcgataccggtatcggaatgacggacgaacaagtcaaaaatatttgggaacggtattacaaagcagatccatcacgtaagaataccaaatatggtgaatctggtttagggttggcgattgtccaccaactcgtccagttacattatgggacgattgaggtccaaagtattcctgaacaagggaccacttttaccttaactttcccagatgaaacgattgtgacaagtgaaagctaaaccaatttaaataggcgtcacgacaaggattaaattgtcgtgacgcctattttttagattaaatatgcaattgcgtttgagctggttgggtttcactgatgatttcgccagcgtgcattgagagggtaacagcggcgcgcttgttgagagcctcgtagaagttgtcgctatccattagaatcaggtgggcgggtttacccacttcgagaccatattggtcaaggacgtgcattgcacgagcaccattgtaagtaatgaagcgataggcattcatgatttcagtatggcccatgatttgggttgccagtaggccactatacaacacatcaagcatgttgccatcgcccattgggtaccatggatcttgaatatcatcttcaccaaaagcgacgtttagcccgttggcagtcagttcttttacgcgcgtcaaaccacggcgcttcggataagtgtcaaaacggccaccgagaaataggttgacaagtgggttggcgatgaagtttaaatccgccatttttaacagccgcatcaatttgtacatataggcatcgttgtaacagcccatggcagttgtgtgtgaagccgtcactttgtctttcatccccgtttcaagggcgagagtcgcgactgtttcaagactacgtgaattgggatcatcaatttcatcggtatgtgcgtcgaatagtaaatcatattcttgagcgagttcaaaagcaaacttcaaggattcgacggcatattcgcgattaaattcgaaatgtggaatagcaccgattgcatcaacccctaattgggcagctttggtcattaatgctttgccatttggaaaagaaagaatcccttcttgaggaaaggctaccagttgcaacgtcatccaatccttgacttcttcgcgaacctcgattaaggctttgagcgcaactaagtctggatcagtcacgtcaacgtgtgagcggacgaattgaatcccatggctggcctgtaattttagtgcttgaattgcgcggtgtttgacgtcgtcgtgggttaaatcctttttgcgttcggaccaaatccgaatgccatcaaacaaggttccagattcattccattcaggctggccggcggtgagagttgaatcgagatggacgtgaggatcaacaaatggcggtaatgccaattgaccatgtccgtcgatgacttgctcattaggatgcggtattagctgtgcctcaattgctgtaatgatcccgttttcaattctgattgactgcaatgattcttgattctcaatgtgcacgttttgaatgagcattttatccaacctcgctttttttattagtgagtataacaatcatgagttgactttggcaagtaagtttaatacaatgcttataaatataaatccttttaagggcagtccagtgaggctgacaaaggagcggttaacaagtacattagtggacctgctctgtctaggagtaggtctttttttaatgcaattaaccaagtggagggtatcaaaatgacaaagcaacaaacaattcatgcagtatccaaggacgcacgaacgatgggcagttgggatttgttcgcaacttggattggtgcaaatgcgaataacggcacttggtttatcggcggcattattgcggcaactggcttgattcaagggtctacgttgttactagttgttggctgtttatcgtacgtcttgcttgcactggcctcctacatggggtatcaaactggtgtgggggcgatggggctaacgcgggcctcatttggcgtgaagggatccgtcttgccatcgattatcaatgtggtacaattcatcggttgggctgcggtgaatacgtatattgcagcaacttcagtgagcttcatcatcaaggaaatcatgggctggtcaggcaacgatgcagccactaaccggatgagcttgattgttgggattctaattatgtctgtcctgcatttaatcagtatttcgctcggtgaaaaatccgtccgctggattgaacgaattggcatcatcttagtgattatcttagtcacttgggaatcaatcattgtcttcaaaatggtaccgttcaaagacttattggcgtggcgaccagccagcaacttacggcttgaatttgggaaggcggtcgatatcctagcagcgtttaaccttgcatgggtaaccgctgctgcggacttcagtcgtttttcaaagaacaagaaagcagccacaggctattcattcttaggcgccaatattggcctgttctggtttgctttcatcgggttaacggcgacaattgccacagcgattacgttaaatcattttgacccgaacaacgcggatccaagcaccattgcggccaaattagggttaggtgttttagcgttattagtgatcgtgattaccagtacgacagctaatgcggtgaatctaatggctgcgggatcggctttaaccaatatttttccgaaatttaaattaacgccggcattgtgggtcgtgacgttattggcaacggtgatgacctttatcccggtctatgttgcctcatttttaaccactttcgaaaccttccttgatagtattgggatgttcttaggacctgaaatcgcagttttcttggtggattacttcattattagacggtggcactacaatgttggtgcgctcaatgaagttgctggaccatactggtacaccaaaggatatcatctgacagccatgattgcatgggtcattggggtggtcagctacttggtcttaaatcaattcgcgattattcacgcttatacgggggcaacgtttatcgcaatggggctgacagcacttgtttattggttaatgattcaaagaaaagaaaagacaatttaagggaactaaaaaaacgtcttaattaaggcgttttttttaatttttaccacagagttcatataattttcatactttagttttacactatctttattaggaggtgggtcatgttcttcattaaatcaattccagctaatattcggtattatttacgccaatctttgttaatctatctcgtggattgcctctttttaggcgtcatgctgattgcgctgagcttgatcagtttagaacgacatgacctcaaccagttgaaaaagcaattagccaactttaacacaactaaagaggggactaaccccctgacacatctggttcaaagtaaagaagtcttactgggacgctatcaatttatcgcggtagtgctgactatcgttatcgcacttgtgattggtattttgacttggcaagcgtttaagaagatgcgtcaggatatcgatactttcactagtgcgaattggtcgcgacatacaattgtcaattattatacgttaacggcgctttgcttactaatcagcgcaagcgtgacagtgattttaggttggttattagtcaattcctactattggcgcggattagagctgattaatcaacagtggctacaaaagccgttgcgaccaatacaaggtccccgagcatttcaaccgttatttaaaaatcatctgactgactttagtagtcattcgttattgaatccgattttgcatgagagcaccaagcagaatttaaccaatcaagtattcgcccaactatgggcaccatttatcagtctaattgcaccagtctacattattggttggtgccaagttactcgctttaggaaaatgagaaaggcgtgattgaaatgctaaataaacaacccttagcacttggacaggtctattttagtcaaccggagatgattcatcagagccttgaatcacctgaacccccatatgtcattgattatgaggcgcctaagattctaccctttatgtccggttgggataacttgttgcttcctaaaaagcagcttgcaccaacgttaaaaatgttgattgaacagcatttaaagcgcagtcggagtttattgggcaccgaattaccgccagtcgatcagttctggattcaattgattcgcggtttagcaagccaccagcaactcgtggtggtcaagcatttcttagatgaacttccaccaacggatgctcgccaattattaaatgatgtcagagcggtagcagcgcagtttcaaattatcgtaatcatgacaacgactcaggaatccgtttttaatagttttcaatcgcaggtgattagctaacgtcaaaaaaacgcaaggacaatatatgttgtccttgcgtttttttttgacgattattccgtatcgctagttgttgttgcatcagactcttttttcagggcctttgattttggcacttccgtgaggcttgattgatcacccgctaattctggagcatcggttttaaagagcccaacagtcgattgatcaccattttgcgagaataaactggttgaattagcccctaatttattttgaatatcgacaagctgttgatagccagtcagatagttataatcggcagggttcactggtttaaaactttgtggtgtatagaaacgtaataggttcttttcgttaactgaatccgacaaactcaattcgtggttcacttgtttctgccaagcagcgacttgtttttgcaacctagctgttggttcagttacttctgtcccatcctgattattgtagatggtgccatcgagtactgtgtaatcaggggtgacaaagttatggtttcggaaagccacgacttgatcatgttgtggtgataataaatcggtgccgaattggacgtaatttttattatcaatcccgagtaagtgaagcattgttggtaacgcatcgatttcgccaccatattgtttttggataccgccttttaaaccgttcatgtgaatcatgtaaggcacacgctgtagttgggcgttatcgtagtcggtccacgtttctgggtcgcggcctagtacactgagtaaggccttattatcagaattcgaaagaccgtagtgatcaccatagaggacaatcattgaattatcatagagcccagaggctttaagataattgaagaactcttctagggattggtcaagataatgggcggtcgcaaaatagttgttgaccgctgtattatcagttgtggcacgggggaagtcaccgtctttttcgggtaatgggaatggaaaatggttggtgacggtgatgaatttcgtgtagaacggctgttgtagctgttcgagatacttaatcgattcaccgaataataatttgtccttcaagccgtattgtaagacgttatcaggatcggtgttaaagtaggaagaatcgaagaagtagttgtagccaaagttcttgtagacgttattgcggttccagaaggtgcccacattaccatggaaaacggcactcgtatagtcaccgttttgcttgaggattgatggggcagcttggaaggtgttatccgaaccaagcgttgtaaagactgagccttgtggtagaccgtagacgccggtttccatcatgttttcggcatcactggttttaccttggccaacttgatggaagaagttttcaaaacctaatgtattttgatcatgatagaggctatttaaaaatggcgttacttcgcggccttcgaacttaaagtcgattaggaattgttgaaaactctctaaatgaatgacaatgacgttcttgcccttcgcaacgcctgcgtattcagcgttcggtgcagcgtaatgctctttcataaagtcgagcaccggatctaagtcgtaactctcagcttgggcacgcacttgattattctgagtagtcttgaaagcatcgtagacggtgaaggtgtcgatgccgaggtacttaacgatgtagttccgatcaaacgtccgtgataaaatttgaggtcggctgatttcacttaagccaaggttgatgccaaataataagacggccaatgaggtaatactgaaggcccaccaccgattaaatgcgtgtttgtcgatcttgatgaccttggttaaaatcagcaaggctaagacaataatatcaatccaatacagcgcatcatgccagttcatgagggccagtgaacttttgctgagcccagccgaaacttttgaataccctaagatggtgttgatggtcatgtaatcggtgaattgccggtaatagatgacattaaaatataaaagagcggtgttggcggcatagataatcaagcccaaccaataactgagatgcggctggcgaacataaagaatgatgccgaataaaaggagcgtcgtcgcgaccggattaaagattaaaatagcaatttgtaagaagccactagctgcgaggttaaaatcggtgaagtacccgaataacgtttttagccaaaataaaaagactaacaaactcatgaagcctaatctcgtggataggaatgatttaatttttgtgagtttcaaataatgtgacatcctttcaaaaaacagaactaaaagagcgctaatgccttattttaacccgagggcggcattagcgcaaatagcagtttaaagtttaaacagaaacttaacgtttcgcgggccgcatgatggcatcgtactttggattcagttgatctggcgccaaaacatgttgataaacggcttgtaattcatggccgatttctgtaatactcttagactgcgcagtttggtagccttgagctgttaaatcgggaacggcattagtgaccattgcttggatgagttgactgaattctgcgttagtgtggcccatgtagcagttttgttgatcggcaagccagccatggtaaaccggaatatcgcgcaccaatactttttgatgacttgcaagggcttctaagacgacaatcccttcagtctcttcataagaagggaagaaaaataagtcagcattggcatacgcaccttcgataatatcgcctttgatataaccagggaagatgacgttgtcgggatgatcctgtttgacaatccggcgaatattggctggaatactgtacatgggtacatctccaaaccagataaaggtgtattcgggtagacctttggcgatttcgacaaaatcgagaatccctttgcgtttaaagaagaggccgacgcagataatcactttttgatcaggctttaaatggaagaaattccgaaaagcagcttctttagctggtgtggcttgatacttagctaaatcaatgccgtttgaaatgggagcgatagggttggttagaccatagctttccaataatgattttgaataaggggtgggggtaattaagtggtcggcttgttgatagaggctaacgaggtaccgtttaacaaatggagcgagttgattggaaccaacaaaggagttgcgaaaatcttcttcggtcgaatgtgcatgataaatgacgggtttccccattttacgcgcctttttgatgacactgcggcttttgagtccgtatgtattgatatgtaagatatcgtaatcttgatcattcggatcaagcgtatagtcaatccccatttcggttaacgcgcgtttttgatgatccaacgcccgcccaattccagatttagcgagtagtttttcactttcaaaatataatagaactttcataaaaggctcctgtttcaagttatagtaatttctattatagcatagcacagtaggcacacatcgggctaaagttgggcagtcgatacctaatagtttaagattcactttagtcgagtaattaagcgttatttattgaaaaaaaacagctataatggacttaattactcattgaataatgaacagataggttaaattagtggaataagtgaggttggttttttggtatttcttgggcgtatttatgaacaatggatcctcccttggggggaacagtataatcatttaccactcatcaaattgacggtggagagtttagataagacgattttgtattgtttggtttttattgtgtgccggttagggtacttattaatgaaacgacgcaaaatacagcttctcccagaactgaaactattgttatttgtgttttatattgccttattggtctcattaacggttttacggcatatttattatccgtggcaaatgcagctccatttgcaacgaccacttagccaaattaatttgacaccgtttgttgagactttcaagttacggcaagcgcccgcccagattgattattggtataacttctacgggaacattgcgtggtttatcccgtttggtttattgcgacggtcattgacacagcgcaaaggggattggttgattacgattattgaaggggctctgttatccctgtgtattgaatccgcccagtttgttttagggactggcatggcagatattgatgatctcatgtttaatacattaggggtgatgattggcgtcctgttatatcaagtcctacaacatgcaaagcgaaaacattaaggttatcaacggtaagaaaacgcttatcgttgatttttttactaaaaaaaacgcttttttacgtaaaatttacgtaagcgcaatcacgactgggacagttgcttacatgacggtagtgaaggctggtaacgattgaatggtgccgttttcctactagccagcggatataaaactatgtataatggattcttgtactttagagaagaagaggaatttataaatggctattttaattgcattaatccctgcacttgcatggggtagtatcgggttagtgagtggcaaacttggcgggaatgcctatcaacaaaccttaggaatgacaattggtgcgctggtttttggaatcggtacctttttagtattacaacccgctttaaacttacggattatggtaatcggtatcatttccggtttattctggagcattggtcaaggacaacagttccaatcaatgcaagcgatgggtgtttctaagacagtcccattatcaaccgggatgcaactgattgtaaacactttagcaggagctttgttattccatgaatggaagacaacgcacgattacatcttcgggattactgcattagtgatcttaatcgctggtgccacgttaacttcaatgaaggatccgaagagcagtgttgctgctaaagaagatacacaatttgcacgtggttttagagcattaatcttatcaacaatcggttatggtggttacacaatcatcgttaactggtcacacattggcgcaacatcaattgttttaccacaagcaattgggatgttcgtcggtgctgcaatctttgccggtgttggcattgggacagcggtcttcaataagaaaacagcactcaacattagtactggtttattatggggtcttgggaacttatttatgttgatttcaatgaatgatattggtctagcaattagctattcattatcacaatgtggcattatcatctcaacaatcggtagtatttacctattgggtgaacaaaaaacgaaaaaagaaatggtttacgtcacacttggctgtttattagtcattgtcggtggggtcaccctcggtatgatgaagtaagcaacttactaataagtcacctagacaaattgtctgggtggcttattttgtttagagtgtgtattattctatagaaaaggcaaaagaagtgagtcagatgaagagaacaaataaaacagctgtcagttactatttattgagtgtgctagttcccatgttattaatggtggggctatatgcaatgctccaaattgtgccgtttggacggcataatttattgattagtgatctcggtacccaatatatgccctttttggcagagtttaaacggcaaatggcccagatgaatttcagtacgtattcattttcactttcactgggtggcgatatattaccgctagcggcttattatttaatcagtccttttaatttactgctcctattttggtcgaatagccagttgccagtggtggttgggtatgtcattattttgaagattggggcaatgggtttaacgatggcccattttctaaagacgcgtcagcctgaatatcatttttccgcgctaatttttgcaacagcttatagtttaagtggctttgtggcaatgaacttttataacctaatgtggttagacgctctgattttcctcccactggtcatcttaggattagaacggctatttttaaaagggcgtcctggcttatatatctggatgttggttgccactatctttaccaactattacttgggttatatgtcatgtctatttgccgttttgtatgcaattagtttgttaatcaaatggaaacaaccccaacagtcttggtggcaactagtggttcactggcggcaggctatctggcagttttgttgggcgtcattgattgcggggggcacaacagcagttgtattattgccgtcgttacttggaatgttgaagactgggaaaaagacaatcgctgcaaccagtttttatccaaccccgcagtttggctgggaagttttgagccaatttcaagtcggcggcagccattatacgcaacgcttaattcatgaaccaactttatttatcagtacattagcgctgttatttgcggtctattatttctgtctaccaaccattcgacggcaagcaaagtggtcgaacggctttttaattgttagtttagcgttaagtttctgggtaacgacatttaatacgatgtggcacatgttccagcaaccagaagggtttccatatcggaatacctatttgatggcatttgttctcatcaaaattgcctatgaagcaagtattgaaccaatcggtaaacgtcaaacgaaacgcctggttattttgatagtcggtggcttgctcagcattggccagttggcgctctactatgggccacatgtacgtggtgtgcagaaacaatcgctctggttgttaatcggactaatggttttggctagcgttatttttgcagcgtggcaaaaaggagcacgttggcaaccatgggtgattggtctgggaaccgtattgacgtttagtgaactggtgattaatggccgcttgacgaccactaagttaccgatgggcgatcaagttgtttatgcgcaacaataccaacgccaagcagcactctttgaacagcttgaacggcaaacacctgatttctatcgcgttaataaccaagcgattctcttaaaaaaagcgtttaaggaaccgtattatgggtacaatgatgcgttgacctttggacagtatacattgaacaattattcttcgacacttgatgagcggatgcggacgatgttggttaatctcggtttttatagtaagaatgcccggcggattaacgggattgggcatactgtgctgactgatctgctatttgccaatcaatatgacctaattgctaagcaaggacaggttgtgacacaaccccataaaacgttaggcttagggtttgcggttaatgaccagctagcacacgtggctttaaaagcacatgaaccgtttgaaaatcaagatcgaattatgcaggcgatgacggggcaaacgacaccattttatcaatataatcaattagatttacaagcgcaaaaacgtcggcaaattacgtttacaacgcaagttaagacaagtggatatgcttatctatacttgccgcaacaaaacttatcaaagctcaaagtgaaaattaatggccgaacacataaagcaccgattgaattgaatgggaccacgattattggtttgggtcgctatcaaaaagggcaacaactaacgctgacaattaccagtcggcaacctaaagcctttcgtaagattcaggtggctagtttagaccaggttcatttcgatcaagcttttgatcagttggcacaacaacgcttaaagatcgacctaaaacaactgtcggcagataatggtcggattgctggtgtagtaccagctaagaccgctgatcaattactttatctaagtgtgccgtatgacagtggttggcatgcgcaagtcaatcatcaaacagttcgtacacgacgagtgatgggcaatatgcttgcagtgccacttgagaaagggactaaccaagttcgcttagtctatcgtgcgccgggactaattatcggcgcgatcatttcaacatttagtttaatgacatggggacttatcttaattaagcaacgctggcattaaaaaagcaggttaacgatgacaatcatcatcgctaacctgctttttattgtggcttatttggggtgtagttgagtggctaagccgagaccaattaaggtcaggccgagcaaactaacaaatacgacttggtaaccggcgacacttaaaaggagagttgcaagggtgacgcccagcgcgcccgcaatttgacgaatcgtggttgtgacggcagttccgtcagcgagcacttgatccggcaggctattagcaccaagtgtaacagcaggcatcatgacaaatgcgttgccgccttcgatgaaacaggcacacaggatcatcaatggtaatgacagccattggtagaagccaatcaaagctagccatccaatgctaatcatggttaggccaacgagtaaggtcggtttaaagccaattttatcagctaaccggcccgcgagtggattcaaaaggcttaacacaacggcagcagggaccaatgctaatcctgaaagaagcggcgtcaacttcaattgagcttgaaaatataatgggtagatgactgtggtgacaatcaatgaaatataggaaatagcagtcaatccgaccgcaatatcgtagttaaggtaaccgagaatatgtaaattaagaagtggcgttgtctgggtgagttgccggtagacaaaataacccagtgctaggcagctcactaatccgataccccagagtccgattgggttgatagtaggatgattagcgctactgatgacatataataaaccgattaatccagttgtacataaaacggaaagaccatcaaggtgatagggcttagccggcataatatcagaaatagtgaagttagctgttgctaacacggttaagataatcagaataaaggcgatgaatagtcctcgccagctgaagtagttgagaataatccctgaaataatcggcccacaagctagtgcagagcccattactaaaccagccaggcccataatttggccccgttgattttcagcagtaatggttaataagacagtttgaaacgatggaaataaaacacctactgcgatggcttccaacgcccgcccgaacaatacccaaccgaactgattagcgaagacaattaatagcgttccaatagtaaataaacttaaaatccccatgtagagtcgtttgaatgggatgttgtttaataaccaaggactaatcggcatcatgacacacattacgagcataaaaccggttgtcagccattgaacagttgtggctgataaatcaaaataggccattaaggttggataagcagttgaaagggcagattggctgatagacattgtgaacgtgccggttagtagggtgaatgtaaatagttttagtgctgttccagatagataacgttggttggacaagtaatcagatcctttttttggcttaccttaactataggacgtcatgttttatttgtaaaatgaaacgcaatttgaaatcgttatcggtaacaaaggctaataattagccttttatctatacttagtatatatttatactcatgatgagtatttagatattatattaaagggggaacgaccatgagtgtcaaagcggatcaactatcgactcaggaatacatcgtacggtggaatcaatttttagaacggtttatcgtgtttgaaacagtatttagtgagtacacccggaccagcaagaacatcatcaaagggcgctgtctggtggacgaaaatttggaatcgttaaacgaatattttcaacgtaacttacgggtttttaaacaatttattgatcaagccacattactaaatccgccaaaagaattacgagaaattaaccgtcagttacaattagtaatgactgattacgtctcgtccgctgaagccatggtcaccgccttcaacgagggtgatgagttaaacttatatcagaaactcacaacgagccgtcaacaacaaaagagtgatcgaatacgcattagtgaacttttaaatcaaatcgctgtttttaaaacacaggcagtcaaataaaaaaacgacacccatctggcaactctcagccggtgggtgtcgttttttttgactagataattttacgccgagcatgttcgataaatttaaacttatcggcacggtgaatcgattcggtgaattgaaggagggtattatcttgtagatgggtgacacctttaacactgactacggagctgttaggcggtaggttcagtatctgacactgttcttcagtggcgggaatcaccgtgaactccttactgccatacccaatttcgagtttgagtgtttcttcaaagtaacgatagagtgagtcttgtgcaaccccttttgaaatgtgggggactatgctagttaagacgtagtcgttatcgattaccaggggctgaccgttaacgacgcgcagccgttgaatgtaagtggcaggtaactgctcttcggattcaagatggaaaagggtttggggaacggtcgtctgtgttaattgcaagacttgagtgtcagtatgcatatcgaaaagactatctaattcacgataactggtcaatcctgaaatcggaaaagcatacttgtctagaccgagaaccaaagagcctttccctttaattttatggataaagccattttcaagtagactacctaatgctttgcggacggtttcacgcgacgcaccgtagagttcagtgagttcattttcacttggtaagaaagtgccgctttgatagagttggtgcgtaatcttgcgcacgagatctcgataaatcatttcatattttttagccattcgatattctccaatttgttttctcattcctatcataacggggattcggtgaagttgcaaggttagattaagcgctaacaagaaaacggttttaaaaagtgttgaaaacttgtacgtacatgatatatgattacggcgtactgagaaagcgcttttattcatgctacttttaattcaataagattcgggaggaattattatggctcaaaaggattattcacaactcgcacaggcaattgtcgccggtgtcgggggtaaagaaaatatcgatagtttaattcactgtattacacggcttcgtttttatctaaaggacgaatcaaaagcgaagaccgaagaaattaaagcattagatggggtcattaacgttcaaaaggcctctgggcaataccaagtggtcattggcaaccaagtcactgccgtttatgatgccgtgattgcagaaatcgggacagagtttgctggcgaagatgaaacggcccaagttgtggctgcaacaacgcgccaacaaaatttaacgccatggggccatgttaaagaagcctttaatcaattaatcggcgtgattaccggtgcgatgagtccgattgtcggtatcttagctgctggcgggattttaaaaggtgtcttggcgatgctaacgatgccacaacttggcgcgttattaagtgctaagagtgaagcgtacattgtcttaagtacgatgggtgattctgttttctacttcttacccatgttggttgggttcactgccgctaagaaattaaaaggtgatccagttttaaccgctgtcatcggtggtgttctggtgcatccttaattagtggctttaaacgggaaatcattgcttgaaatcgggtcattaaacttcccaatggtcaactacacatattcgattttcccaatgattctcgcggcttggttgctaaattaaccaaatgggttaaaggctggttaccaggctacttacaaattatctttacaccattgattgtgattgcagtcgtttctgccattacgctttacatcacagggcctgctattatttggttatcaaatggtttagcattcgggattcaattcttattattaaagagtggttggttatctgggttattaatcggtggattctatcaagtgcttgttatcttcggattacactgggggattttaccaattattgccaacgatgttgccgcaacgggtcacagttactttaacgcgattttaagcacaacaatgattgcacaaggggccgctgttttagctgttgcgattaagacccgtaaaacagctttaaaagaattatcatttgctggtgcgatttcagcattctgtggggttacagaacctgctatttatggggtcaacttgaagttccgacgcgtcttcattgccggtttacttggttcagccgctggcggatttgtcagtgggttattccacggtaatatgttcggtttcgcggggtcgtggatcggctttgcatcattcttagatccaaaacacctagcagatttatcaaacttatggattttcatcgcgtcatcagcggttgcaacgattgtgccatttattgtaacgctcgtttggggttataacgatcaaatgacagctggtgaagcaatggctaaaccacaaaaaccaggaacagcaaaataaacgactgaaataggagagatatcgcatggcatggtggcaaaaagcaacagtttatcaaatttatccgcggagctttcaagattccaacggtgacggaatcggggatatcaacggcattattcaacggttagattatttacaaaatcttgggattgaattgatttggttgacgccaatgtatgtttcccccggtcgtgataacggttatgatattgcggactattaccacattgatcccatttttggtgatttaaccgattttgaacgactcttaaatgaagcccacaaacgtgggattaaaatcatgatggatatggtggtcaaccatacttctgatcaacaccgctggttccaagagagtctcaaaggcaaggataatccgtaccatgattattatttgtggcgtgatccagtggatggacacgaaccaaataattggttatccaagtttagtggcagtgcttgggaatatgtgccagtacttgatcaatattatcttcacctatacgaaaagagcatgccagatttgaactggcggaatgaacacttgcgggccgagatttttaaaatgatgcaattctgggcagaccttgggattgatgggctacggttagacgtaattaacaatatctcgaaggataaagacttcccgaatgatacgtttaaaacgccaagcgacgatgggcgcaatttctatacgaatggaccacatgtgcacgaatacattcatgaaatgtacgaaaaggtctttggcccgaaccaatttgtcacggttggggaactttcctcaaccccaattgatgaagcgattcgttataccaatccagcccgtgaagagttatcgatggcgtttaccttccatcatgtgaaggttgattataccggtggcaaaaaatatggacactaggcgattatcggctgtctgatctaaaacgggtgcttagtgattggcaaacggggatggctgccggtggtggttggaacgcattattctggtcaaatcatgatcagccgcgtgccgtttcgcgcttcttggatgacggtcaataccgcgatcaatccgctaaattattagcattagtcgaatttggcttacaaggcacaccgtatatttatcaaggggaagaaattgcgatgaagaacgcgaacttcaccaccgttgaccaatatcaagatgctgaatccatcaatgcttaccagcaaatgttgagcgacgggattgatgaagcgttagcgattaagattttacagcagaaattacgcgagaactgtcgaattccgatgcaatgggatcaaacggcgcatcacgggtttacgactgggacaccatggttaatgccggttgagcacgatgattactcagttgccgctaagattcatgaacccaatagtgtctttgcattctatcaagaattagtgcgaatgcgtaagcttatgccagttttaattgaaggggactaccaattatttgaaccagaggacgaagcggtttacacttatcaacgacacctagatactgaaacgattcgcgtgatggctaattttactggtcaaacacaagtccgttcaataccacacgtcaaggacgtgctcatggataattacgaacaaccgcagtttgatggtcagcaaatcactttacgaccttatgaagctatcatgatgcgggtttaagaaaagaggaagaacgatgtttaattttttgaaaaaaggaccagttggacaggtaacagcccccgttgctggcagttatttaccaattgaacaagttaccgatgaagtatttgcaagcaaggcagttggcgatggctttgccattacccctgatgaacggcaaacaacgattagcgcaccaattgatggtgttgttagttcgattttccccactaaacacgccatcatgattacaacaaaacaaaatgttgagattctgattcatatggggattgataccgttgaattgaagggcgcgccatttacgatgcacgttgaagcgggtgatcgtgtcaaagctggcgaagcgattgttgatattgactggcaacaactagcagccgcccaaaaggcaacgactatcatggtcgtcagcagtaacgccacctttgcaccagcagagccactaccaacaacagttacgactgacaccattgttggacagttcgacttagcggcagaataggtgggttaagatgcaaccaatcattattgaatctgatgatttcgggatgaccataccgatttcgcgcgcaatcattactggcttaaaaactggcgtgatttctaccactaatgcgcaagtgacatcgcctcattttgaaatgagtgcggcactcgcccagcaacatgggattacggcaatgggattgcacttggttttcgacaaagaccgcccaattagtcagccactgacgattcccagcttggtaaccccggctgggttttgtcatgcttatcaaaccttacaaactcatccaaaacagttggccattactgatgttaagcgtgagtttcaagcgcagattgaccgctttttggcgagtgggttacaactcacgcatttgacatcgcaccattttgtggcaacgttaacgcctgaaatctatgcaattgttctagaactagcgcaaacgtatcatgtccctgttcgcaatgaaacggcgcatttaagaccgacagaacaagcgtcctacctgctattaatatcggaatatgccgttttaacgactgggacgttgataacggcgcaacaaacaccgtatttaacgccacaggaaatcaaacggcaactgacacagaaaaatttggtaggtacgccggtgatcttaagccatattgggtatttatcggcagagttacggcataagagtcgtctgacgacgaatcggctagccgaattcaatgcgcttaaaacattaaagcaaaccaattattgggatcaatttagttggcaactgacggattactcagaattaggagcgaagtagcaaatgacacaatatcaacatttaacagtacttggtgatagcatcacggatcaacgtaatcattacgcacacaaatggtactaccagtggttagcagaatggctcgcgattcccacaatcaccaatctcggaatttcggggtcgacgattgcccaaccgtatgatccgatggttgaacgctggcaagccattcctgaatcaacggatttattattgatttatgcgggtgtgaatgactttggtcgtgatgtaccacttggtcaatttggtgatcagtccacagtaacattctacggcgcactacaaaaattacttgggcagattacgaaacgttacccacaagcgacggtttattttatctcgcacgttcacattgggactgacttcttttcggccgtcaatcaaggcggttatcagcaacaaaattatgaacaagcgattgcgcaagtgacggacttgtttggcgttcagcatatcagtttgtttaacgaatcagcgttgtcatttgcggatgcacaacaagcggctgagctgagtttagacagtctccatcccaatgatgctggccatgaaaaaattgcccagttcttgagaactaaaattagataagcaaaaaggcatcgagctaaaagttaatttaagctcgacgcctttttttgtggctgaatttaagttagattagaacaaatgatgacggatttctttagaagagttggccaatcccgtagtgaatggccattgtaattaaaccaattaggatgttccgaataatggagactttgactttgccatcgcccagtttagcgctgataaacgcggtaatggaaaccgcgatggtgacggcaatgattgtgccggtcatcttgtaggcttcaggcagtagaatcattgtcacaagggggaagacgccaccgaaagcggctgagaagagggatgcaaacgctgcggcccacgggttcatataatggccaagctctaggtcatatttaacattaacaattgttgctaaaggcttcttatgcattaagtccttagcgattgcgagtgccgtttcagaagtgacacctttggcttcgtaaaaagcttggacttctttaatttgatcatctttagctgtttttaagcgtgcttgttcaatggcaacagcggctttttccgtgtcactttgcgaactaactgaagcatattcacccgccgccattgaaaaagcacaggctaataaatcagcaagtccagcgataaaaatggtgaaattattggttgttgcggcggcaacactaaagagcacaccgacaacggttagaatcccgtcattagaacctagaacgccggctcgaagggtattcatcttttcttccatcgtttgatggggtttttcagttgttttgagtggggctttaagaggggtcataaaaaaatcctttctaagcgattattgtttgaataatgtcccaatagcgtaagtgactaccatggttaataatccggaaatcacattgcgcaacatggcttttgaacgattcgctttgccgagagcggctgcactgtagccggttagcgcaagggcaatcatcactgcaatgatggtggcttgcacgcgaatggtttggggtaataaggtgattgcggctagtggcaaaatagaaccgattggaaatgagatgaatgacgcaacagcggctgcgtaaggactggtaaaagcagtcgggacaaacccatatttttcacgtacgacagtcgtcaacggatcagcagtcatcatttcgtgtgtagcccgattggcaagttcaggatcaatcccagtgttgacgtatttttgccgaacaaaagccatctgagacgcataattactgtttaaattcaatttcgtattaatgattgccatttcctgtgcgtctttttgcgtgctgacagagacgtattcgcccatcgccattgagatcgttccagcaatcattccggcaattcccgaaatgaagatggcgaagctattgcttgtagcgccggcaacaccgataacaattccggcgacggataaaatcccatcattggcacccatgacgctagcccgcatcacgttaattttttgggcgagtgataatttttttgacaaggtgaagcctccaatactttttattactttataatgattataattaataacaactttcattttagtcaatttaatttgaaagtcaagtagcaacctagaccaattaaatttgaaaaatggcttgccttcgagtgtactttaaggaatatgctaaagacattaaagaaggggtgattaaaatgagtcgcattttagtattaggggcagccggacaagtggcccagttagttattgagcaactgttgaaagaaaatcaacatgagctcgtgctatatttacggcacgctgaacggctaagcgcattagcacaaaatccacatgtcacggttattgaaggtgatgtgttggatcaagagctgttggcagacagtttagctggggtcgatatcgtttacgcaaatttaggcgggcagttcgaaccattaatgcaaaacgttgtcgcgacaatgactgcagcgggcatcaaacgattaatctatatcagtggattaggcttgtatcatgaagtgccaggtgcttttggtgagtggaatgaacaagcagtcggccatgaagtcatggatgacacgcggcgggcggcgaagattgttgaacaatcttcgcttaactataccattttacgttgtgcctatatgaccaatgaagatcggatcgattacgaattaactgaaaagggaacaccgtttaaagggacgattatttcacgacggagtatcgcgcaagttgttgttgatttagttaatcatcctgaaaaaggaattggggcaagttggggcattaatcagccgaatattgatggcgatcgtcctatttattaaaaaacttgccttatagtgtactctaaggtataagctatttttgtaggagggatgtcgatggcacaagagcagtacaaaatcggcgagtttgctaaattagttggtttgtcgacttacacattacgttactatgaagaccaaggcttgattatgccgcaacgcgatgcggccggtgtccgcttttatacattagaggacgttaagtgggtcgggtttatactccatctaaaagggaccggtatgcggattacagaattaaagtaatatgttgcattgcgggctcaaggagacgcgacgattgaagcgcgcaaagctttattgcaaaaaacaaaggctcaagctgaagccgaattggctgagcgccaagcaaatttacagatcctaacgcgtaaaattgattggtatgatggtaaattggatcagagtatcgatcaagcagagagttttgaaacgtatttacaacgatttgaatcctaataaagtgaggttattagaatggtcaagaatgaacaattaaaagaaaaacaattattcccagttggagaagctaatgtggcttatcaagacttcttcgtcggtcaaagttatttatcaatgttagtgaacgaaccagacgtgaatgtcggtgtcgggaatgtcacgtttgaacctggttgtcggaacaattggcacatccatcatgctgggtaccaaattctattggtgactggtggcgaaggctggtatcaagaagaaggtaaagcagcacaacacttagtcccaggggatgtgattgttactaaagacggcatcaaacactggcatggggccactaaggatagctggtttagtcatgtcgccatcactgccggcacaccagaatggttagaagctgtttcaaatgcgctttatgacgcactttaattcagaaaggggtttttaaaatggcaaagaaacaaacagcaggccgcgatctattgggtgattttgcacctaaattcgctgaattaaacgacgatgttttattcgggcaagtttggtcgcgtgaatcagagttaccagcacatcaacggagtttaatcaccatcagtgccttgatttcaggtggtaattttgaataattaccagcgcatttaaagattgataaggaaaacggcattactgaagctgaaattgtcgaagtgattacgcatttatcattttatgtcggctggcctaaggcatggtcggcgatgaacgctgctaaagcggcttatcgaccagaataattaatcagggattaggacagataagattgtcctgatcctttttttgatggtatgatagacaaacaaatcagcatcaagaagtggaggaaaggccttgaacgagccacaaaaaaattataccaacggtgttttaatgactttatcagtgattggaatgaaatggaaaccgttgattctctgtcatcttgtggcaggacctcaaagaccggccgaacttaaaagagtcgttcagggaatttcagccaaagttttaaccaatcaattacgtgaattggaacgagatggcatcattactcgaaaagtttttaacgaagtacccccacacgtggagtatgcgatttctgcgtacggcaaatcattggtttccgtcctaggaatgatggccaagtggggcgaagatagaatcgactttttacagagcaatggtgatgatgtgcagttggattatcgagaccatgagaaatacgatatttaaagaaggcgataacatttattcaaaaagaatgttgtcgtctttttagtgatttcacaaaacttactttgaggtgcgttagttagttgaaagtgcgtaattgtttattgcgaagtacccgatatactaaccttatcaactaaaaagtgaggggaaaagaaatgaatgatattcaaaataaagtcgttgtgattaccggtgcatcaagtgggattggtaaagagacggctaccttattagcagccaaaggcgcaaaacttgttttagcggctcgacgaacaagtgcgttggcggcgttggcaacggcgttaaccgctcaatacgacactgaggttatttaccgacaaacggatgtgacgcaattagcagacatgcaagccttaatcgaattgacaatcgctaaatttggtagaattgatgtgctattcaataatgccggcttaatgcccgtctcaatgctacgcgatggtaaagtcgatgagtgggagactatgattgatattaatatcaaaggtgcgctatatggcattaaatatgccttacctttaatggaacagcaaaagagtggtcatatcattaccacggattcagttgccggtcatttcactggtgaaggcttatccgtttattcagccactaaatatgcaatgcgcgcggtgatggaagggttacgtgtagaagaagttggaatgggcattaaatcaacgttgatctctccaggacatgcgcaaaccgaattagccagccggattagtgatccgcaattacgagcagctgttctcaagagcgaaactgaaactggattaacagcaaccgatgtcgctaatgccgtaatgtacgccatcgatacaccagataatgtgggcgttaatgaagtcattctccggtcaattgatcaaagagactattaagccattggtcaaagattgaattgagtcttgacaacgaacgctaaaaataaaaaatattttcgaatggtctagttcagcgcttgcaatcgtaagttaacggcactttcagaaaggctttgaaatcagctaccacaaattgaattaaatacaagagtttaaattagaatgcttagcgtgtaccatatatagtgttgtttcgtcagatggtgcatcaatatatggaaaatggtgttgacgatctggagtgataactaaattcatataaagagggtttcagttcaatgcaagacaatcgtgcaatcaccagtgtatttaatcctaagtggtatattcaacagatgaaagggtggacaacatccagttatggtttgttgatgtttgggttaggctttattttagctgctactatttccggtggtccaataactggcgtgtcgtttttaacgatgctcgcggggatgttaggcttcacctgtactattagtattacgaatacgaaacctttaaatggtgtctttggtgtcatctctgcattaatctacattattgtggcttataatgctaaaaactataacgatatgttattacaaaccgtctacattattatgttagacatcccagtcttattaatgccagattgggcgcaaaacgttgataaaaaagtccgggggcttgctactcgtggtaaaggacttcgtaattgggcgttgacgctattgttctttgctgtatcagttgggttattatatctctgggaaagcaatatgacggacagtccacgaccattgatcgatagtatcgccgcttcagttgggtttactggcgcactgttgaccacattacggtttaaagaaagctattacttctggttcatccaaagtatcgtatcaatcacgttgtggggcattacagcaatgcagggtggttcaaattgggtcttattcttcacctatatcttgtacttatcaaacgacttagtctcattcttcgacaagaacgtcgtttggttccatcctaaagaagccattaccaaaaattaaatcaataaaaatagcgtcccaacacaccgcaatgtgttgagacgctatttttatgatggccgggttgttttatagttcaacaccgttttcttcaaataattctggtaatgtcttcagtgattgaccatcgtattctgcgaagaaatcagccacgctgtattctttgccagcaggacgagaagcatcatagcttgcgctaattgtttctgttaacttaccatctttaatggttagttctaattcttcaactggaatactccgtttgtcagtgatcttagcatcaattaagaatggtcggccagcttttgtgacttcaagggctttgtcaaaggcagcgggtaattctttagaagaacgaacggtgattgattcaatgcccattgcttgcgcaatcatggcaaaatcttgatcttcaatgaagattcctgagtaatccattggaatatcatcttgttcactcttgatgaagtttaatgcggcatttgatgtgataatgttaatgattggtaattggtatttcttttcagtgatcaagtcttgcatgaccattgaaaaggcaccatcacccgagatgttgaagacttggcgatctgggtagctcaattgaccagctaaggcaccaggaacgcctgaacccattgaagcaaagagggcagaaatcacccatttgttcttaggcgttaagttcaagtgacggaaactgttgatgatattatcaccaacatcgattgaaaagacagcatcgtcttcagcaatccggttgatttctttgtagattggttcgaattcaagcggatcagagtcgcggttcgttaaaacatcaaggtaggcttgccagtttgccatatcagcaacagcagctttgaagaatggtgttggggcaaccgtttcacttctggcgattactttttcaacaaaagcagttgcatctgaccagatcccgaagtctaagaaatggtgacggccaaattgtgcttcatcgttatcgatttggataaacttgaagtcatgtgtccgataaattaagttggcaaatgggaagtcagcaccgatggcaatcacaagatcactaacggccatgatttcatcagccgctttagaagcagcccggttagccatgcctaagttaccttcataactatcaggcactaaccctttagcaagcccagtcatgacgattggaatttgaagtttctttgataattcaacgagcttatcgccgccgtctttaatcccacgaccaacgtgaattacagggcgtttagcgtctttaaccattgctaagaattgatcaacttcttcgtctgttgcgactggaccagccacttttttacgatctgaaggtgagcttgagctatatggtgtatctggaatttcaacgtagccgaagtcatttggaataacaaccactgcgacgccattgtgtttgtaagcttcacggattgctttatcaacaacgtatggcaagctttcaggtgtcataacgaggcggttataaacagcaacgtcagagaacattgggttttcagcgaattcttggaagtagttgtagttcatgttcttgcttggtacttgaccaatcaaggctaaaactggtgcatgatcttcttttgcatcatataaaccagttaaaaggttagttgcaccagggccagctgaaccaaaagcaaccccgattttaccagttaatttagcgtcagcagctgcggcaagggccccaacttgttcgtgacgaatttgaatatattttaaacgatccttttcaatattaagagcattcattgttgagttaaatgagccaccagggtaaccaaagatatgatcaacgccccaagattcgataactctaagcatagcaacactagctggaatagttttttgagtagtaactgtcattatacagatctcccttaaatcaataattaggttgcacacaaccttatgggaataatttagcatacttagaaaacgattacaagtgttaaacgtaggttaatcatatccttaattaattaaccgctgataaattggtgcttgataagattgaatggatttaagcagcaaaaaccgcgctatccgaaaatggttagcgcggtttgattagtttaaatagtctagtaaagtatcgacagttaatgcttgcttttcagtcgcgttcaagtcggcaatcagtttaccggcttttaacaccaagagtcgattgccatattgcaacgcatcctctaaatcatgcgtaatcattaggcaggtgagttggttatcgcgaattgtttgattggtaaaagtcatcaatgcttggctggaaactgcatctaaagcagatgtgtgttcatctaataacagcaattcaggtttttgaatcgtcgccatcaagaagtttaacgtttgtcgttggccacccgacaagttactaaccgggcgattgagttgttgatccaagtgattcgggagtgtcttggcgagcgctttgatttgtgggagttgttgcttgagacgccggggaaataagcggcggcgttggccacggcgcatcgccaacaaaatattttcggcaacggtcatatcagctgcggtgcccaacttaggatcttggtagacacgactaatgagccgtgtgcgttgttgggcggattgcttcgtaatgtcgtggtcgttgaatagtagttgcccacttgtgggggttaaatcacccgcaatggtattaaaaaaagtcgatttacccgcaccgtttgcgccaaggaggacgacaaattcaccaggattaatcgtgagatttaaatcatttaagagttgtttaggttcattattatcagtaacttcaaaattgaggtggtttaaagtcatacgcggggtcatttggtagtcagtcctttcttttgttgtggtgcgatgatgaagatggccaaaatgacggccgagaagagtttgaaatcattggcgttaaagccgagttgtaagacaaggagtaagatgaggcggtagacgacgcttcctaggataatgctaattagtttggcgatgaaatgcttgccgacaaggagccgttcaccaatgatgatcgcggataacccaatgaccatcacaccgatgcccatgttgacatcagcaaagccgttatattgtgcaacgagcccacctgcaagggcaatcaagccgtttgacagcacgatcccaatcgttttcgtccgctttacggcaatcccttgtgagagggccatcgtgggattatcaccagctgcaatcagggattgaccgaattcggtgtagagtaagccagccagtaataatagggcgatcagcatgatgactaggttaatgactaagagccgttgatcgagcgttaattgatggaatagcggcagttgatataggttgtgttgatcaccaattgccatgttggcttggcctaaaatccgcaagttgatggaatacaaaccggttagcgttaaaatcccggctaacaaactctggacatggaagtagttgtataaaattgccgtcacgagtccggctaaacagccaccgatgaatgcgactaatagggaaaaggcaatgttatgttgttgcaacattaaagcgccgagggctgcgcctaacgggaaactgccttcaacggtcatgtcagggaattttaagattcgaaaggtgatgaaaacgcctaggcttagtaggctccataataatccttggtcaatggttgagataataagattcatttgagaacagctcctttttgattagcgatttgcattaaactctgcggaattgtgatgtggagggcttttgcttttttgaggtttaagactaaatgtcctttgcgtaaataccgaattggagtggttgcgggttttgaacgaccacttaaaacagcggcggtcatcttaccggtttcaacgcctaagtcgtattggcttaggccgacggttgcgagcccgccatctttaaccatcgtttcagcggatggaaagactggcgttttggttttgtcggtcacatggacgagggtgcccattacactagcaatcgtattatcggtgggaacgtaaattgcatcgacttttgggactagattctggctgacttgttccagatcgttgactgaactaagactggcctcaacaacggtcagccctttttgttcagcaagttgtttgaataagtgcatttgactggtggcagagttatcactgcttgaatagagaatgccgacggttttcagttgcggcatgatggtttgcattaatgccaattgcttttgaatcggggcttgatcggatacgccggtgatattggcaccaggatgggcgttgttcttaacgagattggcactcgccggatcagtcacggcgcctaagataatcggtaattgcttagtggcattggctaagctttgtgcggcaggggtggcaatgccgaccgttactttggctttttcagtgacgaattgattgctcatcagacgtaaattactttgatcgttctgcgcattttgaaaatcaattttgatattacggttgttatgatagccttcgcttgctagaccagcgacaatcccgcgatgaatttcatcaagtgcgggatgagataagggttgtaaaatcccgacaattggcaatttaggttggttggcttctttgatttttttgataccaagtagggtgagcaaactcccaaaaattagaatgaggggtaaaaaacgtttgagtttagacatggcgaaagctcctttaacgtgctttttgaaactgactcttgtgcttaactacatttaccaaaccggtgattacatcaccaatttggtaaattaggttaatgctcagagtcaaaccgtttcaaacgcacttctattttttaacgtgcttttcaaaccgtattcctgtgcctagctacgtcgcacaaacgaccgactgcgtcgttcattcgcaccactaggctagtgttcgaaatatacccggtttgaacgcactcattattatcaaacaaaaaagtcccccacatgacagtcatgtaggggacagaaaaagcctacatggatttcctcgagttaaaatccatgtaggcttaaaattcaatcgattactgatgaatggccgcatggatacaatcaaaagactgtatccataacggcatacaatctcacttagcggctttgccaacgaatattcaattgtactaagtgagtgtttgtcattttcagtaacctccgttttatttgatgatctgaagtatagcgggatgggtgaaacaagtcaaggactttgagtaattttcttttgaaaataaaggtgggtctagtctgaaaaagcggtcgatctggcttgctttttagcgctaaaaaagctaaagttattaacgtatacttgtgtttaaaaacaggaggaataagacaaatatggcacatatttcatttgatgcatcccgtttggacaaatttgtccaatcaaacgaacttgcagaaatgcaagcaatggttaatgctgcagactcacaattacgtgaaggcactggtgcaggcaacgacttccgtggtttcttagatttaccagtgaactacgataaggacgaattcgcccgcattaagaaagctgctgctaaaattaagagcgattcagaaattttcatcgcaattggtatcggtggctcatacctcggtgccaaagctgcaattgatttcttgaataacacgttctacaacatgttaccagcagaacaacgtgacttcccacaagtattattcgccgggaactcaatcagttcaagttacttaaacgacttagttaacttgatcggcgatcgcgatttctcaatcaacgttatctcaaaatcaggaacaacaactgaaccttcaattgctttccgtgttttgaaagacaagttgatcaagaaatatggtaaagaagaagctaagagccggatctacgcaacaactgaccgtgctaaaggcgctttgaagacagaatcagatgcagaaggctacgaagaattcgttgtgcctgatgacatcggtggccgtttctcagtattaacagccgttggtttattaccaatcgccgttgctggtggggatatcgaccaattgatgaaaggtgcagctgatgcccgcactgaatacacagatacagacgttatgaaaaacgatgcatacaaatatgctgctttacgtaacattctttatcgcaaaggttacacaaccgaattattagaaaactacgaaccaacattgcaatatttctcagaatggtggaagcaattgatgggcgaatctgaaggtaaagaccaaaaagggatttatccttcaagtgctaacttctcaactgacttgcattcattaggtcaatacatccaagaaggtcgtcgtaacttgatggaaacagttgtcaacgttgtgaaccctaacagcgacattgatattccaactgatgaaaagaacttggacggtttaggctacttagaaggccacacaatggacttcgttaacaagaaagcttaccaaggtgttgtcttagcacatactgatggcggcgtccctgttatgtcagttaacatcccagatcaaacagcctacacattaggctacatgatctacttcttcgaaatggctgtctcaatctcaggttacttgaatggtatcaacccattcaaccaaccaggtgttgaagcttacaagaagaacatgtttgctttattaggcaaacccggctttgaagaattaggcaaagaattaaacgaacgcctataattcaacgtttataaagataaaattcgacttttattaaagcatttagtctattgattttatgaaatggtgcagtatttggtgcattgttctaaaataaatggattaaatgctttttgtttaatacggataaagaataaaatatataaattgcttatttttagtaagcgaagtataatgaccttatcaaagatgaccaattcatcaataatattaaaagtaaaaatggagatgatggcaatgttagtcattcaatatgtcaacggtcaaacgaacgctgaaaaggtttatcaaaaagcggctgaatttgtcgcaaatcaacaactggaagtacccgatttcgaagattacgtcgcaattaagcgggggacgttggatgggcagccattaacgttggcggatgcgaccatgcgcggcttatataattatttaaatcaataaagttaatctgaaagaaaaacgtcgctcaagagagcggcgttttgagttataaaataaaaaagaccagccaacggcagtcttttaattaacgtgtagtaatcataatgagatttgagctgtgataagtttcgctaggactattttcgaggataaaagccggcgtgtccttaacaaagtgcgagatttttgcgacgatatctgcagcagcacagtctttgatggtcaacttatggcgtgaaccattcgtagaaccaaaggcagataatgtgtcattttgttggagcgcaatttttgagccctcgttaaagaataacttaaccataatttaaaaccacctttcgtaagtaaatcatataatattgataagaaaatcacaaggataattaacaattcaatacccttaatattatcaagtgcaattacttttcggaaaattattcgttaaaagaaactactttttctaatattcaaacgccatttcattaaccgattcttccaagccttcgacaacttcattttgttcaatgaacgttaaccaagtttgatattctttggcgtgttcaccacgaatgttgaatgccattttcacttgaatactagcgataaattcggcgaccattttatcaacggcccgatcgaccttattctcgttccaacgtttggcaggttggcgtttttggttcttttcattttggtagtctaaacctttggctcgaaatgtatcgatgacgcgggaatgttcttcaagataggcctgtagttcggcattgttcatagtcgtgctcctttaaactctaatagttagcaagtaaagattttagttcagcttgggcagcggtgtcttcagaaacggcaaagacaagtggttctgagtaagcttgtttgccgtcatcttttagttcgctgaaaccatcattagttgatgtgaggtgaccattacctaatttaagttcatacacgacgccgttatcaccaagtaggtatttgctaaccggtttgtccattgccatgttaaggctgtaattatccgcgaatgatccacgatctaaattgtctttaccgactgttccatccaaagcggtataaaagacacagccaccaattgcatgaacagggtaggcattaaaccctgggcttgctgtcccaggttgaactaaaatgcggccatcaggtgaattggcaaaccaatcgccaaatccggcagcaccgtggtcaaaataccaatcactgacggccatgtttccgattgtggcgcgttcagccgcccacgctagaaaagcttgattaacagaagtttgttggtcggcagtgagcgcttttttggcacttgttgactgattagattgttgttttgcttgttcaatagattctgaagctgcaacgatactttctgattgttgtttaatagaagcttctttcgagctagcgattgatcgacgctgattgctttcttttgcttctgatgaggcgcgatagcgtgctaaactttcggagtgggttgcggcttgttgatcaggtttaattgaccgacaactagctaatgaaagactacttaaagtaatgaaagtgactgcaatggttcgtttatgcatgttaaatcccccaagttaatgattaataagtcattgcacggtgtccctgtggtgcagcaattttccagaatttatcaaatgagattttttttcgtttgccggtatatggatcgttaaaggtaaatgaattttgatcatagccaattaataagacggaatgcgctggttgtttatggtagttaatccaagcgacaattggtttcttttgttttaaagtagctttgagcgtgctaatcggttcgtccgataaatcggtgaaactgccgagatattgatagaagaatcctgtccaagcaggaggatacatagtgtagccagtatcatcgtatggattcccccaaaagccgacctccatatcgccatcattgacataagggatactatcggccacttctgttttgctcatgtcaacgctacggtaatctaacagcatggcaacagccgtaatttcacaaccggttggtaattcaggaaattgtgaaatgggtgtgatgtcgagcatcgtttttttgggtgtttttttcttaacaattttttggggtgtggttttatggaagaaccaaatcccggcctcacttctggtcggtcctgtgaaaagccataaaaaaagggtggtaatcagtattaaaacgactgccacgcgcttgtaaaagtgttttggcatttgataatcctcattctaaatttagtcgacgaaataaatatttaaaatagtatagcatttaaaggggcgtaatagctatagccactcacggatttcaactgtgatggaatcgccaatttcttttttgagttgtgcacggatgtctttgcggaccccaagaatgtaacaaatgttgccatctggctttttaagtcccatattgacaatactgccatcatagggaatttgttggtcgaaaagggcgtggacttttacacgacccttcccgaagattgcgcggatatcgccaggaaattagacatatgcaccgcctttaccaatcgtcgcggcttggattgaggctgtaaaagtataagtttgctcggtcatcggtcagaactcctttaaaaaaacgtcattaaaaaaagtgaccacggcaaattcagtcgtcacttttagtgattattggaaaaagcgcattaattggcgattaaaacttgcccaccaagtgtttgggtgcaaaagggttgcaacgattgcttggcgatgttgtaagaaccagcgcttaatattttgatcagacaatttagtgatatcaaacggcatttcgaaccactcctaaactacctttattatatattagaaatgggacacgtcaaaaacaaagcattaaacttaaccaatctttaaaccggcttaaggcttaattaataagacgttggtgttagaatgaacactgatgaattgtgcaacagaaccgattaagagccgctcaaaggcgcccttaccactgacaccgagaactgttaaatcaatatgagcttcttctgggatggtaaaggctaattcacgacgtggcgaactcactttaaggatggctcgtacgttagggacaccgtgttctttagcgaattgcaccttttgatcaagatacgattgaacgaaatgtttttcagatgtcgttgtttcagcagggtaagtcatgcgtgcatttgtgtaaagggtatctggaataatttgagccacaactaattcggcattattgcgtttagcaatttcaatcgcctcactgaaagcgcgttctgataactcagaaccatctaaaccgataagaatatgctgataattaaacataaaaaagacctcctttatttaccttcaatatagcattttaaacgaagaaacgccgtaaataagcactttaaattcgataggggatagctggttgagtgactataacaatttggcaccactaatttgtgccgaccgtatcgtttactttgattgaactgcgccctataataagaatgtgaataatttctcccgaaattttttaaccactatataaaaaaagagccgtcgaatcgtagattcggcggctttctttttataaatgattaattgaaagttgtgtgacttgttgcttgttgttattggtcgtcataacggtatagcgaacttcgcgatccgtcagttgcattaatgacccaggtttcttaagtgagcggtcgaccaattcagtaatctgggttggtttggttccgatacttgttgaaaaggcgaggacgtagtttttaaacgttagattcttacctgcgttgagagctttaattgagatccccagtactttgctatcactgacgttcatggcaatcacgttgttgctgtcaacttgatcagtgcgaatgccttcaagtggattcgcttcgaaaacgcccagtcctttttgttgggcaatcggattataaatctgaataaagttcggccattgcacaatttcttttgcgacagggccttcaacataagttggattacgcatttcttcattatcagcaagtgtaatccggtactgcttagctttgtaagggacttcgaatgcgaaagcatcatcggttgttttagtcgtatgaatggtatcaccgatttgccaataaacctttttatgtttagtcttaccagtgatttgcgcattgaagccactgtttgtttcgtggagctttgctttaaccggattcccacaagcggttaaaataaaagttagacctaaaatcatgaataataatttgacgtgacgcatttctcacactcccaatcgataatagggttaactatgaatcaaaaaataaaagactccccagtcttctacttcattgtaacccatttcatctttttttcaaaatcaccatattcactatttaatactactgtaagagaatttcaacttctgaattgcgcggacatgtcgttgattattagccttgtaaacatcatcagtgtattcttggaaagttccgtttggacgggttgcaacagagacgaacgacccagtcttggataagacatctttggcataaacgagttcttggcgattgttatcagtcgcgtagtctttcattttttggtagtcaccttgaacactgacatagtaatcatcagcgtcatcgagtttaccttgtgctagtaaacgccgaccttcagcagcaacagcactatcatgatcgttataatcaacatttgcgacgttaactgttccgttttctgttaactcgccccaaactttattatacttttgagcgatgaattcagtggcaacagtcgattttttaatatgtttgatgaattggcgttcagctttatcgaattttttatctttcttttcaatcttcgctagttcttcgcggtgttctttctgagccatgtagaagttatagccaacaggagatgccgcgataatcaaaccaatcaagcaaataattagaggggctttaagccgttttttaaaaattaagaaaaataggagcaggataatgccaaatgcaaagacagcaaggcctgcataaagaacgatggcgagtattaagttcatatagtaacctccaaaacagtaatcggataatcagggttaatacggttaatcaatgaatgttatcccattttatgagatattagcaagtcaaatttacagaaaggtctgtaaaaatatgaatcttctcatgaaagggatttaaacagaaaagtcaattgtttttccttgcattttcccgtattataataggatacgtaaaaatatgaatcatttataggaggaatagtagtggacgcttctttgacaacccgtttggctgccgaatttattggaactgcaattatgattatttttggtaacggggcagtagccaacgttgaattaaaaggaacaaaaggttttagtagtgattggtttttaatcgcttttggatatggttgtggggttatgattcctgccgttatgtttgggagcatttccggtaaccatcttaatccagctgttacattaagttttgcagtgatgggcttattcccttgggaaaatgttttaccatacatcattgttcaattcttgggtgcaatggttggtcaattattattggttgctgcttacaaaccatattatgatcgcacaacaaaccaagaaggcatcttgggctcattcgtaacaatcgatgctgctcatagccggatgaatggttttgtaaatgaatttttaggcacattgatcttagttttcggtgctttagcaattggtgcaggtaagtttggcgctgccggccatattgttgttggtttattggtgatgacattagttgcttcattaggtggcccaacaggaccagctttaaatcctgctcgtgatttaggcccacgtttggtgcatatgttcacaccgcttaagaacaaaggcgactcacaatggagttacgcttgggtgccagttgttgcaccaattatcggtgccatctgtggcgcaggtattttccaaatgatttttgcataacaaaccgcttctaaaaatagtccgtcaggactattttttttgctttcaaagcaaaaaatacccggcataaaccttaattgggaaaggcctataccgagtatcttctgaatattgaaatgatcttacttgggggagtattaatcatttctgttattgaatatatcataaaataacgggagtttacaacccttttacgtgtaaaaccctaaaaaaataaattattttataataatgcatattattagtggttaggattgattgcaccgttacgcaagtatgctttgaactggcggtatattggtgcgaagacttcgatatcattttcgttgagcatttctttagggaaatagaagcgttcatcgccgctaaaacggcctgagatggcggctaccaagtcacttaatgatgataactcttcaagttgaccatcagattgtataatttcaatctgagttttgggtgatttagcggagggatcataggcgtcatacggcaaatcgaaactgttattaacagcagtgtaatactcactgttataaccagcttgctcggttagcgcccgtaattctggtaaaacacgttgggtctgttggctaaaggcaaccgatttgagtgggcggcggcttaaaaagcggtcggccaaatcattgagcactgaatccggatagtctaaccagtatagaaaataggtattcaaaacgccatcatctaattttaaatagtcttgtagggtgaagttctgttcgaaaaatggaatcaataattgcggtgcgagactctgatgatggtcaggctgttgataaagaactttcgcacgttgcaagagcttttgcaagacaacttccatgccgcgtgaaacaggatggaaataaacttgttgatacatctggaaccgactgacgatgtaatcttcaacggcatgcatcccgtttgctaaaaaggtaatgcccttatcgtaaggccgcatgactcgtaaaacacgcgtcaaatcgaattctccgtatttagtcccagtattgtaagcatcccgtaataagtaatccatgcgatcagcatcaatctggctggaaatcatctggacaacttgtggattcggataagaatgatcgattacactagcgactttcgcagggaaatcatccgcaacttgggttaagacgcgattaatggctgtctccgggttggtgataatttggcgcgtaatcaattcatgatcagtattgaagatgtgttcgaaggtatgtgaataagcgccatggccgatgtcgtgcaataaagccgcacataaggcgactaaccgttcatcatcgttccaaagtccatcaccggcaacttgactagggtagttaagttggaattgatcacagatttggcgtgtgatttcataaacacctaatgagtgggtgaagcgggaatgttcagcgccttggaaaacagaggaagtcgtgccaagctgtttaatccgccgaagacgttgaaattcgggggtgtcaattaaatcgagaatcacttgatactcgacgcgaatgtagttatgcacaggatcacggaatactttttcacgcgatagtttaatagcggtgttagtcacaatataatctcctttttgaggcccgttaaacttgataacggtggagtgctgtttggtttttaagtagaagttgttgataagctttcgtttgtaattgtggtgtgaggtcaactagttgtggttgttgaaccaaccggctaaaagcggtctgtaggtgcgtaatggctgttgcaacagtcattggtacgtttaacagatcagataggttggccatggtgtccgggatgaccgctgggaaagtccaccgcgtttggctttgtgcttggccagcagtgtaaaagctatgcatgagtttgccacgtgcctgttgattgcctgtaatgctggcgtataagagtacggtaattccgtttttggcacggcgttgggcaataccggcaaacttttgaccattgatgctgagatcgtattcgccagggcaataggagtgagtgacttcgaaatggtcaatcgtgacgggatagtctgcaaaggcagttgtgaacaattggtgcatgagcgcgtaagcggcattaatgcttaggtgatccgccatatcaggaagatagaagctgacgttcaaaacgccggcatccgtcacaatccccaaaccaccagcgttacgcacgaaatgggcatagtgtgcagcctctaatgtggcaaccgcttgtggataagcaggtaactttgtatccatcatgcccaaaataacattgtcagcaagcgtccaaaaatgaataataggttgttgtaattcgcggctcaaagctaagaggctattagcatgagcaaaagcgagtggtccagccgctttttcaaaatgttgggttaaaatagcccattcttgattggcagataaagtcgctaaatcatccatggtaatcacctccgaaaattaaaaactcttcttaattatagcgtaaattctaggcgctgtctgcaatcggtacgttggtcaaagagaattggcggattattctggcgctcaaattttgaatggcttataatagaactacttaattaaaattaaaggaagttatttatggcaagtcaaagcggaattccggtcaaggtacaccttgaaacgcaaattcaacaagatgggcaacttgaaaaacacgttttcgatgaggatggtcaagttgtcaaaatgggagagtcactttacttacgttatctggaacacggtggtgaacaagccaccgcggtacggtttaaattggctgctgacggtcaaattcaattaacgcggggcacagaagaagacgagacgcaattgcggttgtactttaagcaaggcgaagacctcggatcaatttaccaaacaaaatatggcaacatgccagtgctcacaacgacaacccatttattatcgatggtgaaggaacaaccgttatcaggtgaaattacggttcattaccaacttgccatcaataatcaagccgtgggggattacaaattacgattgatttttacagcttaagctagtatgattaaggatagactgttgaaaggacgtgtactggttgaaattagacgtttttaaaggccaaaataaagaagaactatcaatgattgaagtcgcacatgcaattttagaagaaaaaggcgacacgattgcattcgctgacttaacgaatgaaattcaaaactatttaggcaaaagtgatgaagaagtgcgtgcacgcttatcacaattttatacggatttaaatgaagatggtagtttcatttctttaggcgaaaacgtttggggcctccgttcttggtacccatatgaatctgtcgatgaagaagttaaccatccagaagatgaagaagaccaaccaactaagaagaaacgtcgtaagaaggttaatgcattcttagcagatgttaccgacgatgacgatgtgattgattacagtgacgatgatccagaagacgaagacttagatgctgatgatgatgttgatttagcagctacagatgacgttgctggtgatgacttaactgaatacaaagctgacttacaaaacatcggtgacgatgacgatgatgaagacgacgatgccttagaagacggtatcgaaggtcaattatctgaatttagcgatgatgatgaagacgacgaagacgaagatgacgagctttaattagacgtttccgattcgttgccataaaaaaagacgccaaagttaactttggcgtcttttttttgcgtttaatatttttaagctaatcctcgtcggatacccgacttacgacacactctcgttcaagaaaatggtaaaccgcgccgattaagttggcgtcttggttgaagtgacaaatttcgatgtgtggcacaggaataggggtggttgcccctgcacggcgttgccagtaacgattaatactactattgtcatcggctaaaagtgcgtcaatcgcagcgtttaattttggtagtaggtcagttcgctgactaatgccaccaccgacaccaataatctcgggcgtgtaagcaacgtttaaaaagagcatgatttccgcaagggcagcatacatctgtgtgacttcttgggtggcaatcggatccccttgatcggcaagttcgaagacggttttgccatcgattgtattggggagtttaaaattacggagggagacagtcttgccaatttggacgggtgagacttttgaattgttgagtgttttaatggcatctgcgatgaatttttcgaagttatcgattttatcagcagtggttttgagaatggtcccattttcgataatggataagccaatcccagaaccaattattgtgaataaggcgctcagatgaccttgaccaatcccagctgtcatctcggcgagtgctgcactgtcggcatcattttggagagagacgggcagaccaaggcgcgttgcaaattcagtttgaaattcaccgaggtgcaaaaatggcacataactcatgccatggatgatgccagtctgttcatctggatcgccaggacaactcaccgcaattccagttaaatgaaagtcggtcgcaaattgatcacgtaattgttcaacttcggaatagaagcgattgcgtgttagcggtgtagggaattgcgcttggttaattagttggtgtttcgtccaaatcccatatttgacggcaaaaccgccgatatctagagctagtaacgcgtcttgtagcatggtgggccatcctttcaaagtaggtcatgcaaatagtgtagcataggcgatttaaaatcggcgcagaaatgactaatttttttgcttgacgctaattgccatttcttgtattatattctttgggcgctttgcagttactttaattgcgaagccagaatcggttaacaggctccctgttcattttgaatagggagcttgtttttgtttttggttgtttcccaaaagcatgaatgtttagcgtaatgctaagaagaaaaggagaatatttatatgaccaaatatgtttttgtaacaggtggcgttgtttcttcacttggtaaaggaattgttgcggcttcacttggtcgtttgttaaagaatcgtggattaaaggtaacgattcaaaaatttgatccatacatcaacgtggatcccggtacaatgagtccttaccaacatggtgaagttttcgtaacagatgatggtactgaaactgatttagatcttggccattacgaacgttttatcgataataatttaaataaatattctaacgtgacgacaggtaaaatttattcagaagttttacgtaaagaacgtaaaggtgaataccttggcgcaactgttcaagtcattccacacatcacaaacatgattaaagaaaaaatcatgcgggctgctacaacgactgattcagatatcgtgattactgaaatcggtgggactgttggtgatattgaatcactaccattcttagaagcacttcgtcaaatgaaggcggatgttggcgcagaaaactgcatctacattcatacgacattggtcccttacttgaaggctgccggtgaaatgaagaccaaaccaacacaacacagtgttaaagaattacggagcatcgggattcaaccaaacgtcttggtttgtcggactgaaaaaccaattcctgatgacatgcggaacaagattgcccaattctgtgacgttgaaccagaagccgttgttgaatcacgcgatgctgaatcaatctacgatattccattgttattgaagaaccaaggcttagatgattttgtcttgaaccacttcaagatgacagcaccagaagctgacatgacagaatggattgatatgttacacacaatcaagaacctcgaaggcacgaagaagattgccttggttggtaaatatatcgaattgcaagatgcttacatttcagtgaacgaagcattacgccatgccggttatgcttataacaccgatgttaaagtgacaccaatccaatcagaagatattacgaaagaaaatgttgctgaaacattagctggctttgatgggattatcgtccctggtggtttcggtgatcgtggtttagaagggatgatcctttcaattcaatatgcgcgtgaaaatgatgtaccatatcttggtatttgtttagggatgcaaatggcaagtatcgaatttgcccgcaatgttgctggcattacagatgcaacaactggcgaagtacacccagaagcaaaacataaattaatcgacatcatgtcagatcaaaaagatttagaaaacatgggtgggacacaacgtcttggtttatacccatgtaaattaaaaccaggtacaaagactgctgctgcttatgataaccaaagtgttatccaacaacgtcaccgtcaccgttatgaattcaataacgaataccgtgaattgttgacagacaaagggctagtctttgccgggacttcacctgacaaccgcttagtcgaagtcattgaaattccagaaaacaaattcttcgtggcagctcaatatcacccagaattcctatcacgcccaaacaaaccagaaggcttgttcaaggcatttattggcgcaacaatgtagagtgctgactcgaacgggttggctttgaggattaacaagaaaataaggattatggcgttctttagccataatccttatttttaggttaaccggaaaaggcagttcgaggaagcacgtttcataaaagacgctactagtcatcacgacaaagtagcgtctttttgtatgccgaaaaatagttgtgaaaatggagatggtccgttttgaaaagccttacatttttagacttcgatagcccaattgaatgcgatgattagcttttactaagtatgaaaattaaaaagtaaatgttatccctaaatgccttgtaatttatgtgctgattaattattattatacatgtatgactaattatcaacggcattgagtagattgaagccgttttccaattttaaaaaataaaactaaaaacttaaaaatatcaaaagcgccttctggtttaaaccacaggagaagtgggaaactgaaggcggttcttttgttgcagagcgaacggggaaatctaaaaatgaaaaaaatgttaattcaaggtggcaatctcttatctggagaggtcacaattggcggtgcaaagaatagcacggttgcgattattcccgctgctattttggcggagtcgaaagtcgttttagactgtgtgccgcacattaaagacgtcaacagcctactatccattctagaagatatgtctgtctcatctacttttgttgatgacacggttgaaattgatccaacccacattatttcgacaccacttccaagcgggaagattcaaagtttacgcgcctcatattatttcatgggggctttattaggtcgttttggggaagcaatcgttgggcttccaggtggcgacgatattggtccacgaccaattgatcaacatattaaagggtttgaagcacttggtgcgacagtgactaataaccacggtgctatccaaattaaggcaccaaacggcttacacggtgctaaaatttatcttgatatggcatcagttggcgcaacgattaatttattattagccgctgtccgtgctgaaggacaaactgtcattgaaaatgcagcacgcgaacccgaaattgtggatatcgcgacattcttgaacaacatgggtgctaagatccgcggtgctgggactgacattatccgcattgatggggttgaacatctgtatgggcgcaatacacacaccattattcctgatcggattgaagcgggaacttatttaagtatggctgcagccatcggggatggcgtgaacgtcaagaacatcatcagtgaacacatggacgcttacctcgctaagttagaggaaatgggcgttaagatggatgttaaggaagatagtatcttcgtttatccatcacctaatttaaaaatggttcaaattaaaactatgccatatcctggctttgcaacggatttgcaacaaccactaacgccgctcttattaaaagcgcaaggtgaaggcattgtggttgataccctttatcctaaacgaacacgtcacgtcccagaattaattcggatgggtgcagatatctcaatcgaaaatgatgtgattattttacatcatgccgacaagttacaaggtgccgaagtatccgccgatgaaattcggggcggtgcttgtttaatgatcgctggcttaatggccaatggtgtgacaacgattgataacgcaagtaatattttgcggggctatgaccgcgttgttgataaactaacgggtctgggcgcaatcgtcaaaatggttgaagaataagttaaccatctattgttttttgttagcattcatgctaatatttaatggttatgtaaacaaatatctctgacatagcaaatatctcagggcaagacttaagttgtgcatctgaattgatgcagataactttagcaaaaaggagcggaaaagacatgaaacaaggtattcatccagattatcacaaggtagtatttatggattcatcaactggcttcaagttcatctcaggttcaactgctaactcagctgaaactgttgaatgggaagacggtaacacatatccattaatccgtgttgaaatttcatcagattcacatccattctacacaggtaaacaaaagtttactcaagcagatggtcgtgtcgatcgtttcaacaaaaaatatggttttgcagacaagaacgctgccaaataattattttgaaaccggggaatttttccctggtttttttttgcctttttttccataaaaatagccaattgcaaacggcaatcagctatttaatcaacattttttgaattcgatgactagcgagacacgctagcaaaatgactgggaaaaattgaatcgggaaaagaaagagtaacaaagtagcagtgacgtacggttgcgccacgatcaccgtacaactgacagcgacaaccgtggcaaccaggaggccgggagtgtatggcaatacaacggcgagacttaaaccgattgccgcacttgcaaagatggctgggaaaattttaccgccccgccaaccaaaggcaaatagcagattagttagaacggtttttccaagtccgattaagagtaaataaatgaatgattgatctaaaccggatttggtaaaggtgaacaagtagtgttctccagaaaagagtaaataaggcgacaatagaccacaagcacccaagaacacaccagcagctatcattgcaagtaagaccggccgctgaatcgtatcaaagagccactggcaccattgttctatttttaagaatagattgccaaaaactcaaccgacaattaatgctaaaataagaagtggccaaactattaatgtccaatgaatgattggtgtgtgcagtgtaaatggactttctttggggaagagttggttgaccaaggcgaaaccaagaatcccagttgcggttgtgagaatgtataatagaacttgattgaagtgtgatttgaaatgatcgcgcaaggaggttgtctcaatcgcctcaccaacaccggctagcggtgcgtggaagatggccgctagcatggcaccaatccccatcgtcaaaaacgtttctttagtttaagtcgatcgcccaaccaagtgattaggccgccgacgttggtcgagagcgcggcttcagggccaaggctagcgccgcaggctaatacaactaaggcggcgataatgtttttaccgacttgctgttggtaggcaacggacccggtttgtttaaattcgctgagtgtttcatgcattgttttaggataaggcccccaataacgttgcattaagccgacgagtaatccgccaaatagaccaacaagcaacggataaaatggctggttgaaatgcgaataaccgacttgccaaattaagtgtgtactgaaattaatgagggctaaaaaggcggccgctatgccaccaatcaacaatcctaaaagtaagctatataaaacaaaaataattttaaactgcgtggttttagtggtaggtgatgacatagagcctcctagttaagggaattatttatgaactattatgcactacccacgctagtttgaccatagtcgaattgtgagggaaagaataatgaaaatcgatcgattacaagcatttagcgatggcgtttttgccattttattaacactattagtgttagactttaaagtgccggactatcaagcagggcatttgagtcaagcggtgattgcacagtggccaactttggctgcctatgtactatcctttttttatgtggggacattatggttgtttcatcacgattattttgcgaaaataaaacaaactaactggcagttaaacgtgatcaatctcagtattttatttgcagtgacactgattaattacccaactagtttgttgtcggaatcgattgctcaacaaaatggcgctgatattcgatttgcttttacatcgtatgcgattgttgcattagtcatctcagctttgttttgggtattatatcggtatatggcactgcatcatgaactaatgcgtcagtatgaacagcgacacgaggaattttatcaaacgattaaaaatgatcccttacgaagtgtcttgatttacgccattgccattgtcggaattcagattaatagctggctaggggcactgttgattttgctgggcaatatctttcatttcatcgcatacttgcgacttagtcggagtgtcacgctgtatcatttgaatggaaaggatgaataacatggcaaaacaaaaaacaaattggcggtgggtagattggctttatgtcttcaccattgtgagtcaattaatctatattggttattacttagaacaaatgctgactaaccccaaagacaacggaacattgtcttttgccgttttacaagtggttgcaggcctggtgattgcgaccttacctattatcattgaacgctttatgccataccggtttccagagattctatatgcagtttatttaatctttgtatactgttcgattttattggggacgggattacatttttatagtcgcttatactactgggataaattcttgcatgtcttgagtgccgggttattggcgggcttagggtatacggtctttaacgtattgatttcaaaacaactccgtcaaaccatttcagccttactcatgagtttgtttgcggcaacgtttgggagtacgattggtgtgttgtgggaattctatgaatttaccggcgatagtttgttaggcttaaacatgcaacgttatatggcaaaaggtcaccttttattaggccaagcagccttgttagacacgatgggggacttactagcggatgtcttgggatcatgtttaatcgccattatcggctatttctgtattaaacataaccgggactggttagataaactgatgtttaccaaaaaatagagtgcgtttgtggcgcttatattttgagcattaactggatttgacgaattggcgattgtaatcaccgatttggcaaattctgttaagcgcagaaatatgccacaaaaagcacgtttcaacaaaaaagtggtgtcgctctgaaaatgagcgacaccacttttttgtattatttttgtatttcatgttcttcgcgtaagacttttgtattctgacgcacccagaagaggttgacgattactaaaacggttgtcgataggaaaaccccgctgtaaccgaataggccagaaacgctggaaccaattaaaggtccggcgacattccccattgcttggaaggattggttataactgaaaatccgtccggcggaactatggggtgagtacttcgcaagaatcgtttgaacttgcggtaacaatgcggcatcggcgaccccaaccagcagacgcagggcaccgagttgccaaacattttgaacgaaagcttgcggaacgtaaacgaagacggcgaagatcaagccaccgagtaaaattttctcggaaccgatccgatcgccaagtgcaccaaaacgcggcgcggcaattaaggttgcgatccctggagtagccgcgacaactccgctgactaacgctacgttattgccatgatgcattaattgacggacatataaactcaacagcgggctaattgagttgttggaggcttgaataatcattgtggtgacgaacatgccgataattaaatgcgggtatttcaattcatgaatcagttgccgaccgggtacttgatcgcctttttctactggcgtgaagtcttcgtgaacgaaaaccagacagaggataaagacgatgaacaagatggtaccggtaatgaagaaggttgttcgatagccggttgcttgggcgataatcccacccaacaacgggcctaataaggttccggaaacacttccggtggtcagggtgcctaaagcttgaccacttttttcttgtggtgctgaagtggcaattaaggcgtttgaattactgatataacccgagaagaagccttgtaatagtcgcaaaccaattaattcataaatattttggactaagcccatcgcacccaggacaatcgctagtcctaatgaggcgcggagtaacattaatttgcgaccacggcggtcagcaattttgccccaccatggtgaaatcagagcggtaaccaagaaggtaatagaataggtcaccccactccataaactcagttgggccgttgtaaagttgccaagtgtgtcaatgtataacgacataaatggcataatcaaactaaaagcaaccccggccatgaaattaccaaaccataaaacgacgaggttctgttcccattgtgcgcggcgtctgaataaacgttgacgaatgttagtcaacatggtgtcatcatctcgattctaaaaagttaaagcggcgaccacgcttgctgatgtgcgtggtaggcgtcttttaagtgtgggagttgttcaaagagggcagtcagttgcgcatctttagcgcgtggcagctggcgtttaaagtacaaccgctgagtgtcgtaggcagtcaatgcgcttgcttgttgggctggtgtaccatgttcggcaaaatagagtagccaatcaaacagccattctttatcagcatcggcttcataacgggctagcaaagtgtctagctgtgctccctgtgccactaacaagtaatggttacgctgcaaaggggttaactcattatctggatttagatcaattactttgggacctaattgttcgagaaaactatccagcgaatcagcaacggttaaccattgatcgacctcagtatctatgtagcgaatcggtggttcagctgaggcttgttggcaatcaaatacaaagtactgctgttgatgctgactaaaagggactaagtaatcgggcaagtcgggggcttggatgactgcttcaccgttgtgagcaatcccagctaaataatgacactcaacgtcggcgagaccatcacttgttggctcactcgtaggaaggctaaagttagtcaaaaaaccgccattggttgtttgacaaagtgcctgataactcatgggaatccgagggtcatcgacaatcatccgtggtgcagttaaatcaacattcgcaattgctggctgtgcagtaaacatgcaagtatccctcccaaaattggtaactctttaattttaccatttatgtcaaaccaaggttttgttaaggttggcaacctattctttatttgttgtagcgagtctgataatatgaagacaacattaaagaaaagaggatacgcgtatgttgtggtttattattatcattattttgttagtggttggcgcggttggcttctatatcagcacctacaataacatggtcaagagtcggaactggacagatgaagcatggagccaaatcgatgtacaactcaaacggcggaatgacttgattccaaacttagtatcgaccgtgaaaggttatgctaagcatgaacaagacacgttggaaaaagtcatcaagatgcggaatcaattggttgaaatgccagctgataatcggcaagcaacaatggaggcttctaatcaattaacggattcattgaaaagcgttttcgccttgtcagaaagctatccagatttaaaagcggacgcagaatttacgaagttaatggaagaattgacgaatacggaaaataaaattgcgtatgcacgtcaattgtttaactcaagtgctacccgttacaacaaccaaattcaaactttccctggtaatattttggcaggtgctcacaatttccaaaagacagcttacttagaaacgccagttgaggaaaaagcagcacctaaagtttcctttgaatagggtgtgattgggaatgttatttgaacaaattcaacagaacaaacgtaaaacggtatatgtgatgattggcttttttgctttagtattggcaattggggctgcattagggtatctgtttatgcgtaatttgattagtggtgtcgtggtggcggctattttagccgccgtttatatggcgatgatgattggaaactcaaccaacgttgttatgcagatgaatcatgcgaccgaagtccatgatgctagcgaatatcctgatttatggcacattgttgaagacatggcgatggtcgcccaagtaccgataccccgggttttcattgttgacgatcctagcccaaacgcgtttgcaacgggcaatgatccacaacatgctgcagtggcagttacgactggcatcatggcgcgtttgaatcgggaggaacttgagggggtaattgctcacgaagtctcccatattcgcaattacgatattcggttacaaacgattgccttggcactttctgcggtgatttcaatgctcgtgaacatcggcagcaacatgttatggtggggcggcggccgcagtcgtgataacgaccgtgaagaaggtgcaagtaatatcatcggtttggttttttcgatcctattgttgatattgggacctttggcggctagtattgcacagatggcgttgtcgcgaaatcgggaatacttggctgatgcatctggtgtcgaattaacgcggaacccacaaggtttgatcaatgcgttattgaagatttctgacagtgagccaatgcaagctgcggatccatcaagcgcagctttgtatatctcagatccatttaaaggacttagtcggtcgggtgctcatttatttgatagtcatccaccgattgaagaacgagtcgctaaattaagagcgatgtaatgttttaaagacataacgcatcagctgtaggtaatagttgatagaacacgttttatatagagggaggcaaaattcatttttgtccctctctttttttgtataataaaggaaaagaggagtgatcagtgtgcgattatccccaatccagcagttaatggcgttacaatctactctaataatgcaattgaatgagacaccgagcaaacagattaccatgattgatttaccggttgtgcgtggacaattattattggcattgcatgcgcgtcaccagctaacattatcgacgcaacaacgcacaatgattcaacgcgccatcatcacaacgttggcaactaaaacggatggcactcaattaatggatctttggcggcaaacactaccgcagcggtatcggattgttgatcaggcagaggtggtggcccattttgaacagttagaacgcgctaattgggacgttgcgagtttacgcgcttatgcaacccatttaacgggacaacttgctgcgcaaccaacagcgcttaaaaggattttgcaacacaattggcaagcattacatcaagtaggctcagcactttatcaaatgctttttgaagcatacggggaccgaactgcacaaccagtaattaattaccagcggatcaatttagtgctcacgcatttaggggcgcagttggatgagcatgcgtttttgcaattaacagcacgtgattatcaacttgacccgcaattagcaccagatgcgccttttttagcaacctttgcgcaaagtgtgcaacgtgcatttgttggtcgagttttaaccgataaacggattcatcaattcagaatgtatttagatcggcagaatctacgctatatccgccattattttcaacactctggtgaaacagatgaacaagccttagcgcggtttgtacgaaaacgacaagcgacccagccacattattggctgcggcgtgaaccagctcggctccataataaataccgcaacggacagcgcccaacaacgcattggaatcgaaaacgactcacgccggattttcatagtgaatttattctagcaccatctggagcatttatcagtcaatggcaagtgcttaaagtaaaggctgatggtctgattgatagtaatcctgaccattaccagctagatgatggcacactccggcaactactaaacggtgaatcgtttaattatgctaatcggaatgatcggcaacacgcccggttagatagccaaccaccgctgcaaaatgatcatgcactacgcaaaacagcttttaaagggtggcggagtccgactaagcaacaatatcgaccaaatgataaacaggttgatgactattcacggtggtactcttaattggtggtcaatcatttttggggcttttttgaaactatggtacaatattgcgtagtattttaagccataactaaaaaaagcgtgcgtaaaaatgcacacagagtaataggagttattgagatatgaaaatgcagttgggtgaaattgcacgagtcactggggctaaaaacgatattgaacaatgggcaaccattgaagtgacgaatgttgcgtttgacgcacgtcaattaaatgcgggcgctttgtttgtaccgttagctggtatgcgtgatggtcacgactttgttggacaagctaaggaaaatggggcagtggcaactttttgggctgccaatcatgatgcacagccaactgattttcctgtattagtggttacagacccactagcggcttatcagaagttagccatgcattatctccaaaaaattaatcccaaagtggttgcgattaccggtagtaatggtaaaacaacgacgaaagatatgacagctgctgttttaggtagtcagtacaatatgcacaagacacaagctaactttaataatgaaattggtgtgccacaaacgattttatcgatggaagctaatactgaaattttagtgattgagatggggatggatcgcccaggtcaattaaaagcgctcagtgaattagccatgccagatgtcgcagtcattacgatgatcggggaagcccatatcgaatttttcaagacgcgtgataagattgccgatgctaagatggaaatcacagatgggctcaaagaagatggtctattaatttacgctggcgacgaaccgctattgactgaacgggttggcgaactcacaaccgagacattcggtaatttgacgaccaatgacttatatcccttacaagtccgtgcaggtgaaactgaaacgtcattcaagttgaatgcttggccagagatgacgtttacgattccaatgatgggtgcttataatgtcaataatgcgttggccgcaattttggttgggcaacggttccatattaaaccagaattaatgaaaaaagccttggcgaattttgaagtcacaagtaatcggacagagtggcttgttggtcaaaagggtgaacggatgttgagtgatgtttacaattcaaacccaacggctgccaaagaagttttacacaatttcagccattttgagactgacgggcggcggattgccgtcttaggcgacatgttggaacttggtactgccagcaagaaattacacgaaagtttggcccaagaattagatcccacgatgattcaagaggtcttcttgttcggggatgaaattgaaccattatatgtgacgttaaaagagcgttatgcaccagaacgcctccattactttaaccgccatgaacaaacgcaattaattgctggcttgcaagcgcaggtacaacctgatgatttaatcgttttaaaggcaagtcatggcttacatttagaaaaagtagtcgctgctttacaagatactgaagttaattaatgattagcaattgacagacaactgcacaggcacgctgtttagcgattgaagctatggaattagattaacaattggagcaattccgtttgctaattaagttgtggcatgataagctattaaggagcttttttaatgaaaaaggcttttgaaaacaattatattacaagacagatttttgaaaatggtgcaattgacgaagtggacctgttttgtaatggcatgttttttacaaaacaaggaggaacactatttgaaattcgcagaattaggtttatcagaaccaattatgaaagccatcgaacgcgctggctttgaagaagcaacacccatccaaggcgaaacaatcccattggcattagctggtaaggatgttatcggtcaagcacaaactggtaccggtaagacagccgcttttggtttaccaatcttacaaaacttagacttagacaatcctaacattcaagcattgatcatttcaccaacgcgtgaattggcaatccaaacacaagaagaactctatcgcttaggtcgcgaccgtaaagcgaaagtacaagttgtatacggtggggctgacattcgtcgccaaatccgctcattaaaagatcacccacaaattcttgttgggacaccgggtcgtttattggatcatatcaaccgtcgcacagttaaattagaccacgtgaaaacattggtcttagatgaagctgacgaaatgttagacatgggcttcgttgatgatatcgaaagcatcatcaaacaagtgccagaccaacgtcaaacacttttattctcagcaacattaccagcaccaatcatgaaaatcggtaagagcttcatgactaaccctgaaatgatcaaagtaaagtcaaaagaattaacggctgacttaattgatcaatactatgtgcgggcaaaggacttcgaaaaattcgacattatgacgcgtttattcgatgttcaatcacctgaattaacattaatctttggtcggacaaaacggcgtgttgatgaattaacacgcggtttgaaggctcgtggttacaatgctgaagggattcacggtgatttatcacaacaaaaacggatgagcgtcttgaaatcatttaaggctggccgtttagatatcttagtggcaacagacgttgctgctcgtggtcttgatatctcaggtgtgacccatgtttataactacgatattcctcaagatcctgatagttatgttcaccggattggccggacaggtcgtgccggtaagtcaggcgtttcagttacttttgtaacaccaaacgaaatggaatacttacacatcatcgaaaacttaacgaagaaacggatgttaccattacaaccacctacagaaaaagaagccttcaagggccaattagctgcagcggttgcagacatcaactcaatgattgaaaaaggccaattggctaaattcagcgaagaagctgaagaattattgaaacaattctctgacgttgaattagcttcagtgcttttgaagacaatcagcaaggaatcagttcctgttaagataacaccagaacgtccattgccttcacgtaaaaaaggtggcaatcgtagcggcaaccggaatggcggcggcaatcgtcgtggcggtaacggtggcggctatcgcggtggcaatcgtcgtggtaatggcgatggcaaacgtcgtggtaatgacaacaaagacggtcgtcgcaacagtggcaacggcgatagcagcaaacgtcgtagcaatgacaatcgtgacaaccgtaagaagactgatggccgttcaaaacggaacttcacaattcgtacaaacgataaataagactttttaaaaacagcgggcggccaacttggtcggccgctgttttcatatagtcaattgtgacagagatgtaagttcagtctctgtcttttttgtggtaaactaattaaaaatagggtactaggggcgaagacgatgattgctggattaggcattgatttagccgaaattgatcgatttgaaaaagcacagagtaagaatagtcattttgctgaaaaagtattaacagctaaggaatatgaactgtttaaacggtatacggggcgccgtgcgttagaatttttagcggggcgctttgcagtgaaggaagcttttagtaaagcttatgggactggtattggacaggtacaactgcaagcgattgaaacgttaaatgatgcaaagggcaaaccctacatcaaacaagatttatttgagggaactgtccacgtatcactttcgcatacaacgacgttagtgatggcagaagttattttggaaagaggttgagacgatgacagtcggctacttacgaccaacacgcattctagttgatcaaaacgcaatttatgaaaatattcaaaatgaactaaaggatttaaaaggcacagatgcagtgattttccctgtcttaaaagcaaatgcttatgggcatggcatgattcctgttgcagaagcggcccaagcggctggtgctgcaggattttgtgtggctattttagatgaggccttagctttacggcgtgctaactttacggaacccattttggtgctagggattacacagcccaccgaaatcgaattggtgattgccaaccaaatctccattacggtcggctcactcgaatggttgcaagctgcttacgaaattgcccaacaaataccttatccacaaccaatgcacattcatttgagtgtggatagtggtatggggcgaattggttttagaaatgcgactgaattactagcagcagccacatttatcaaagcacatgcgaaatattttgatttagaagggatttttacccatttcgcaactgcggatgatcccgatgatacttattttaaagaacaaagtgcccggtttaatgaactagtagccgtgttaccagaatgtccacgatttgtgcatgtttcgaattcagccacgagtttatggcactcagcttgcaatgagaatttaattcgaatgggaattagtatgtacggattgaatccttcagggaatgcgattcctgaattgccttatgcattgaaaccggcgctaagtcttgaatcagaattggtctttgttaagcaagttgaagccggaagtaagattggttacggtgcgacttatgaagcgagtgaatctgaatggattgggacgattccaatcggttacgccgatggttggtctagacggatgcaaggctcaaccgttttggtggatggacatcggtgtgaaattgtcggtcgggtctgcatggatcaattgatgattcggttacctaagcaatatccagtggggaccaaagtagtttttgttggtaaaagtggtgatgacgaaattactttacaagagatcgcagattatgcagggacgattcactatgaaattatctgtggtttatctgatcggttaccacgggtttacagtggaattgatgaacattaaggattgagaatttgattatcgccagttctgtggtaggatgaataaaggttaaagtgttgattcggaggttgatgcagatgaaagctaaccgtgaacaattatccgttaaattagacgttgagttggtccaagcaattaagcagtattgtgaggtgtatgcccttgatgagaatgatttgattcaagatgcgcttcacgaattcatggcgaccagacagtcaaaagtagataacgtcattaacgggtacgctgagatggctagcatcaacagtcaaattgcggctgaatttaacgcttgcgaaagtgaggcgtacgcacacattcgcgtagttgattgatcctaattggagggagaacaagtgggagaattaatacagcgtggcgatattttttatgcggatttatcaccagtggtcggttcagaacaagggggcatgcgtcctgttttaatcattcaaaatgatgtgggtaatcaccatagtccaaccgtaatcgttgccgcgattacagcaaagattcaaaaaccgaaattaccaacacacgttgggattacggccaaggataatggtgttgaacgcgactccgtgattttattagaacaggtacgaacgattgataaacaacgcttgaaagatcgcgtcacacatttagtggcggataagatggcacaagtcgatcgggcgctcaccattagtgttggacttaaagcggtcttaaatccttaatacataaataccaaaaagaaagaatgaagagaacccgcttataaaagcgggttctcttttttttgacctttatcaacagccggtaaatatgatatgatggtagctgttcgaaaaaacgtggttcgtaaccatcccacgcaaaaaaactaggaggattcaaagatgacgaatcaaagtcgattaaaaacggtgattctaaacgggttagtggcagcattatacgttgttttatcgttattcccaggtatgttgggatttgcttcaggagccattcaatttagaatttcggaaggcttaaaccatttagtggtcttcaataagaaatatctatggggtgttttcggtggggtattagtgttcaatttctttttcagttctgaaaacaagttactcgatacgctttttggtggcgggcaaactttattggcgctgcttgtattaacgcttgtgatgccctatttaaaacaaacttggcaaaaaatggtggtcaatattctcttgttcaccgtttcgatgtgtatgattgcgtggatgattgtgttaaccggttctactgctagcacacacattccattctggccaacgtatatttcgttggcactttcagaagcagtcatcatggtgattaccgcaccagtaatgtatgctgtggataaagttgtgcactttgatgcacaaatgaaatcataaagattaaaaagggcagtcctaattaggactgcccttttttgcgttaaactaaatcatcaagtttggagtcatcacggagcgccttatcagattgtaaatcatcgatttcaggaacacgatagccttttttctcgagcttataaacaatctttttcaaaatctcaagatcaagtccagcaggcaaggtgaaaagggtgcgtcgtacgaattcatcttgcttagcatctaaggtgatgcagctggcgattgaggtatatttagcgataatcttcgacatggcaaccaaatcaccttgttcaccagaagaaagcacagtgagtacatagctacttaattcgagattccacgcttcagaaagcatatttaataacgtgctatgcgtgagaattccgtaaaaattgctatcttcgtctaatacggcgatgtatggcaaatctttaatgttgaagaatactttgaaaaacggtgcgtcaactggaatatacttggtcatattcttcaataagctggtcacgggaagctgcatatcgcccccttgagacttatgacggtagatgtgcatcttatagatgttaccgcggaagatcttgccgctagcatctaggacgggcacacaacggtaaccagactcttctagtagctgtaatgcttcttctaaggtcaccgattcaacaattgtggtgagacgttctttaggtaaaactagggatttaatgagcataggctttctccttagattaaaattctctcatatactaatgtaatcatagcataccaccaagcagattaaaataactagtttttcgactcagcgaaaacttgattagtaatcgatgagaaagaacgtgaaatctaagcaataaaaaagcagggataaaagttaattttattcctactttgtatttaatcgttgagcttactttttctaaacgaattctgtaggtcagctacctctggttaatccgtagaggagaggtgttgctagtacactacgtctaaatcactacaactggaatgccttcgctaacagtatcgtagagtttagccattgtgccaggtggggtattgatacagccgtgtgagccgtgttctttataccagtcaccaccgtacttaggttgccatggcgaatcatgaatcccaacgccagtttcatcgattggcatccagtaattaactgggcttgcgtattcgctgaccccatcaaagttcttccccttcaatgtggcattgcgttctttcttccaaacgctccaaacaccggttggggtgacttgtggtggacgtgctgaaacgatatcagtgtcaattgtgaccttaccatcttgataaagccacatatgttgggcttttaaatcaatttcgatgtaggttgaaccgacactacgcgttttctgatcagttccggaaccacggataacagctgttcttgagaaatctttgcccttaggcacttctgtcattaaggcgtggatttcatcggcaggagagatactccacccataaattccagctgggacagtgactgtgccttcttttgtagaattgaaggtcaaatctttgtcaaaagtatcatactttgcctttaattgataaacgtatttggtaacggcagctttatctagactaattgtaccgttgttatacgttaaccaactttggatgtcttctttaggaacttggaaatcattaccattaactgaatagctgattttttcattagcaatcgtcttcaattgatcggcagtttttttcaattgcttgtccgtagatttcacttcaggttgcgcataatcgttttttaagtcgattgttgcttgaccttggttaataccgtgggcaactgcttttttgaacttagcggcatcaattgtgttcccgtagacttcttttacgagatcgaactgatgattctcgaggttaatatgggcattctctgaaggtttgcgatcagcgttgaccttttcgagggtttccgttgagaatttgtcaaaatcagcggcatttaaaatgagtgcgtcttctgatttagttgtttgttcactggcaaaaacgtggactagccaagaccaaccgttttggctttttttaatcttttccaataacggtttaaaattatggctaaagccagcttcttgaccgctaaaagttagcaatgtttgattgttatcctttagcgtatatttttgacgattcactttttttaagagttctgtgttagcgtctgcgactgattggccactaatgttgacaccggcaacggtcgtatgtggcaagaatgctttttgataatgaagactgactgccgagtaacctccaacaaggataacggctgctacgccaagggcgacgtaggctttcttcgtaagtttcacaacctcaactccaatctctgcataggttaatcataccccagtatcacataaaatacaaaggcgttaactaatagttagcatacaagatatgcacccaaaaagaaataaaaaagtattatttttcataaaaaatatgtagttgataatattaacaccataaaaaaacgactctcatttaatgagagtcgtttgaccaacagcaaagagcttattggcgagtttcgatatctaattcagcaaatgcttttgtaacgatatcttttaattgttttgcagaacggtgcatgctttccatttcgtggtctgtcaatggaatttcaaggatgcttgtgatacctgagcggttaataacagcaggtgaaccgataaagatatcgttcaagccgtattggccttccatgtatacagataatggtaagacagcattttcgtcgtctaagatagccttagtaatacgagctaatgcagtaccgataccgtagaatgtagcaccttttaagttaatgattgtgtaagcagcgtcacgaacactttcgaagatcttaacaagttcttcttctttaatttctggatgagctttaacccattcagaaatcttgataccaccgatgttagcgtgtgaccatacagggaattctgtatcaccatgttcacccatgatataagcatggaccgaacgtgcgtcaacgttaaccatttcagcgatgtctttacggaaacgagctgagtcaagtgatgtacctgaaccgataacgcgttctttagggaaacctgataatttccatgtagcgtatgtcaagatatcaactgggttagcagcaactaagaagataccgttaaagccagattcaacgattgggtcaacgattgtcttcaagattttaaggtttttacttactaagtctaaacgtgtttcacctggtttttgtggtgcgccagctgtgataacaacaacgtcagcatcttttgcatctgagtattcagcagcatagattttcttaggagaagtgaaagctaatgcatcagataaatcgattgcatcaccttgtgttttttctttaaagatatctacgataccaacttcttgtgcaataccttgtaaagttaatgcataagcgtaactagaacctacagcgccgtcgccgacgaggataactttttggtgatctttttcaatgtttgccaatataatgacgtcctttctgtaaatcaattcttcatttcgaaaaccagtatagcataatttacaccaaagttcgcgatttttggttaaattttcagaaaactatttctttcacaaagagagaaataaactgaatatggtataatggttcttaatatcaactggcgactggggagaattaactgctcagaatttttgcgtgatagcgccagtcaaaaagaggacgttaataatgaaaatgattgttggcttgggaaacccaggcagtaagtatgcaaagacaaaacacaacattggttttatggtgattgatcaattatgcgaacggtttaatgtgaccttaaacaagcatgattttgaagctgaatacgggagctttaaatatgaaggggaaacgattttcttagtgaaaccactaacgtttatgaatgattccggtcgttcagtcgggcctttaatgaaatactaccaagttaacctagatgaattagtagttatccaagatgatatggacttaacgctaggcaagttgcgcttacggcaaaaaggttcagcgggaggccacaacggcattaagagtatcatcgcaagtgtccaaagctcagaatttaagcgtgtcaaagttgggattcaacatccacaaaaaagtacagtcgttaactgggtcttaacgccgtttgacaaagacagcgcaccaattatcaatcaagcactagaccaggcatgcgaagcactagaagactggtgccaaaacgacgacttcatgaaaacgatgaataagtttaattagagtgtcgttggcagttggtcagattctgagcatttgcctaacttggcgaattgacgctgcaagcggcgatttgaaaagtgtagcaaagcgcaggaatctactgccaatgacacgtttcaaaaacagagtgcgtttggttgcggttagcaacagagcacgtttcttcgcgccattataataagaaagtaaaggaacttttacatggatttaaggacaatgctggggcagaccaaacaggtgcaatccgttttaaagaatcaacgaccagggattaaacaactacttacagggctttcgggatcagcgaaaaccctgtttttggcgacgatttataaacaacaacccttattgattattgagagtaatacgttccaagccaatcaagttgctgatgatttgagtaatttactcaatagtgatcagatttacactttcccagttgaagaagtgatggcggctgaaatggcagttagttcacctgagtccagagcggaacgtgtgcgaacgttgagttttttagcaacaggcaaaaaaggaattgtgattacatcggtcgcgggcatgcggcggttattacctacagcgcgtcagtggcaagatagtcaactcacaatcaataccgatagtgaagttgatccccaggcacttgctgcgcaacttggtgaaatgggttatttccgagataagttggttggtaaacctggtgagttcgcaatgcggggggatattattgacatttttccactggatgcggaaaatccggtccggattgaactctttgatactgaagtggattcactgcgttcttttgaagcagatacgcaacggagtattgagaatttagatagtgttcaaattatgccggcgactgacttattggccaacacagcacaattggaaatggctggtgaggcattacaagcagcttatgaggcggttgcggccaaaataacggataaaactgaacaaaaacaattggcgacaaactttgaaacaccgattgaacggttgttggccggtgaacgcgttgagaatttagcgttgtttgttgattatctgtatccagatcaatcaagtctgattgattactttaaaaagagtggcttagtgatttttgatgactatccgcgcattttagaaacgcagcggattttgactgaagaagcggccaactggcaaaccgatatgttggaaacccaccgcatgttgccagaccaacgactcatgatggatgcccaagcgctcatcaaaaaagatacacatgcgcatctctatctatcactgttccaaaagggaatggggaagttaaaactcgatgcactcaacaatttacccacgcggacggtgcaacaattctttagccaaatgccgcttttgaaaaccgagattgcgcattggcaaaagcaaaaacaaacggtcattgtgctcgtgtctgatcctaaacgggtcaagaagattgatcagacgttccacgactttgaaattgatgccgtcatcgccaataagactcagttggagacggggcggacacaaatcattcaagggtcacttcaaaatggctttgaattaccggatttaaaactggtggtcttaactgaaaaggaactgttcaatacggcgccgaagaaaaaagtccggcggcaaaccttggccaatgcagaacggttaaagagttataacgaattaaaaccaggtgattacgtggtccacgtcaatcatgggattggcgaatacgtcggcatggaaaccttggaagtcgatggggttcatcaagactacatcaccatcttgtatcgggataatgggaagttatttatcccagtcactcaactcaatatggtgcaaaaatacgtctctgccgaggccaaaacaccgaagattaataagcttggcggtggcgagtggcaaaagactaagagtaaagtttcggcaaagattgaagatatcgccgatgatttaatcgaactttatgcgcaacgggaggctgaaaagggatttgcctttccaaaagatgatcaattacaggctgaatttgaaggccagttcccctatcctgaaacagatgatcaattacgcagtaccgctgaaatcaagcatgatatggaacgcgtccgtccaatggatcgattattagtcggcgacgttggctttgggaaaacggaagtcgctttgcgggcggcttttaaggctgttgaagccggtaaacaggtggcctttttagtgccaacaacgattctggcgcaacaacattatgaaaacatgctgacacgcttcgcggattttgcggtcgaaattggtttactgtcacggtttaaaacgcgcaaagaagtgacggcaacgctcaaaggcttagcagagggcaaagtcgacatcgtgattggcacccaccgcttgttatcgcaagacatcaagtttaaagatcttggcttgttgattgtcgatgaagagcaacgctttggtgtaaaacacaaagaacgacttaagcagttgaaggcacaagttgacgtgttaacgttgacggcaacgccgattccacggacgttacacatgtcgatgctcggtgtgcgtgatttatctgtgattgaaacgccaccgactaaccgctatcctatccaaacgtatgtcatggaacaaaatgccggtgcgatgcgcgaagcgattgaacgggaattagaacggaatggtcaagtgttttacctccataatcgagtgagtgacattgaacgcacggtcgatgagattcaagcgctggttcctgaagcaacggttgggttcgcacatggtcagatgaccgaggcacaactagaaggtgtcatctacgactttgtccaaggtaaatacgacgtcttggtgacaaccacgattattgaaaccggggttgacatgcctaacgtcaatacgatgattgttgaagatgctgatcattacggtctttcacagctctatcaattacgcggccggattggacgtagtagccggattgcttacggttactttatgtataaacccgataaggttttaacggaagttagtgagaaacgacttcaggccatcaaggactttaccgaattagggtccgggtttaaaattgcgatgcgtgatttatcgattcggggagctggtaatttattaggtaagcaacaacatggttttatcgattctgttgggtttgacctatactcgcaaatgttgggtgaggccgtcgctaagaaacaagggaagcaagtcgttgctaaaacgaatgccgaaattgatcttaaactagaagcttacttaccagacgcgtatattaatgatcaacgccaaaaaattgaaatttataaacggattcgccagatggattcagaagcggcctttgatgaaattcaggccgatttaattgaccggttcggtgattatccagatcaagtcgctaatttattagcgattggtcagttgaagatgaatgcagatgacgcgttaatcgaaaccatcaaacaaacgaaagaaatcattcaagtcaccttatcggcgaagggcagtcgccttgtttcaggtgaacaaatttttgaagcgttatcgacaacccgcttgaaagcaacggtcgggtttgaacaagaacaattaagcgtgaaactcgtaatccagccgaagatgcaaccggcagattggttgagtgaagtggcaacttttgttacaagtctcttgaagatagaacaaaagcacacggaacaaccaacggattaggcacgctaagtggaggccaggcatgcaaaataaacagatgcaacatctgatgaaaggcgcggtcattttatcaattgcgtcgtttatcgcgaaggtattaagtgccgtttatcggattccatttcaaaatatggtcggtaacaccggcttttacgtgtatcaacaagtctatccaatctatggcattggcatgacgtttgcacttagtggctttccagtttatatttcgaaactggttgctgaacaagtcaatccggaggaacaaacgcagctgttaagacgctcatttgcactgttaggcatctttggtgctgcaatcttcatttatttacagtatcaagcgccgaaaattgcgggggcgatggcggatccagcattaacaccgctgattgaaatggtatcgtttatgtttttattgatgccgtttctagcggtgacgcgggggtacttccaaggaattttcaatatggtaccgacggcggtttcacaagttgctgagcaactcgtgcgggtcgtggtcatcttggcggcagcgtggctatctttgaaactgcactggtcagtgtatgaaatgggcacatgggcgatatcaggcgccttctttggcggcttggttgcaacctatattttattacggccagcagaaaccgcctttcaactcaaggcgccacaccgtggtggcatcgattttaaggcgtatcaacaattggcaaaacgcttagcgattgaaggcgggtcaatttgcctctttgcttcattaattgtgttattacagctggttgattccttcacagttaaaaaagggttggtcctcagtggattatcggaagaacttgctaagaatatgaaggggatttttgaccgtgggcaaccacttgtccagctgggattagtcgtgtcacttgccttctcatcaacgttgattccgagtctgtcacaagcgcggcaacggcggcaacaatatcaatttcaacaagttgctgaagcgctgattcatatcagtttaggtttatcggcagcagcaaccaccggcctaatggttttgatgccgcagattaattatttcttattcggggatgctgatggtaatcaggcattggtttggtatatgttgagtatcgcaatcatcgcgctgatcaatgcttgcaactcggtgctccaaagtcttgatcagttccataaaacaacggcagccttaattgttgggttaatcgttaaagtagcaatcaatcaatggcttgtgcaacactatcaaattgttggcgcgagtgtcgggactgttatcagcctcggtgttgtgttagccttaattttacggcaatcaccagtgattgtacggcaagcgcttggtttgcaacgctttaccggtaagttacttgcgatttgtgcagtgatgtggctgggtgttaagattgcgctacagtttgcaccacaatcacttagttccagaggacatgcgattttagggacgggccttggcgtactcgttggtgtgctcctatttggcggattagcattacggtggcaattattctcgattcgagaatggctgacgatgccaggtggccggcaactattgcgcctttcgaaaaaaataaaaggtaggacaaaataatgcgcttagataaatttttgaaagtatcacgaatcattaaacgacgttcagttgcgaaagaaattgcagacaagggtcgaatcatgattaatgatcgccctgcaaaatcttcaagcaatgtcatcgtgggtgataaactggagatcggatttggtaataaaacgatggtcgtacgcattacacagatcatcgaaactacgaagaaaagcgatgcagctgaaatgtatgaaattttggaaacaagacaagctgaaaactttgattaaggaaaaagcgctggccgaattaatatgggccggtgcttttttttgtgactttgttgagcatcttaataaaagtcattaagaatctgggatcttagttgacgacctttttgtgaaattgctataatgaacttaattccgagatggggggcttctaagtgagtcgaaaaattgcgaaaatcgagaatgcatttacccagcaacaagcagcccagaaaatcgtgcaagacaaggcagcccatgttaagcgtgttcataaacgccgcttatgtggcttggggattgttgcagtattagtcgtcttaatttgtggtgtgcagattttccaaacccatcattcattggccgagattagagaaacaacggcagctaaagaaaagacattaaaaaaagctaaagcaactgaatctgatttaaagattcaagtgcaacagctgcatgataatgattacttggccaaatacattcggtacaagtattactattctaaagacggtgaaaccatcttcagtttgccccaggacaaggcgcctaatttaaattagcaacaaaaataattcagaatacgaccttgtttcaagggcaaagcgtgctatacttattttattaaatatcacgcttaagtgattaaaagtttgacgagttcaaacgaccatttaggaggacgtagttttatatggcagttgaagttggttcaaaagttgctggtaaagtaacgggcattacgaattttggtgcttttgtagatttaggtgaaggcaaaaccgggttggtacatattagtgaagtgtccgatagttatatcaaagatattcatgatgttttaaccgttggtgatgaagtcacggtgaaggttatgtcagatcaaaacggtaagattggtttatcaatccgcaaagccgttgatcaacctaaagtgcaagaacatccgcgccctcaaagtcgtccaaataataatcgcggtggatatcgcaaaccagagcattcaagcgcacctaaaaaagaaggctttgatgatttattatcagggttcttaaaagatagtgaagatcgcttatcaacgattaaacggaatacagaaggtaaacgtggtggccgtggcggccgtcgcagttaatagaacaaattgataaaggttggcttgaaagtttagtgatagactttcggggcaacctttatttcatttcaagtctgtgttggagaggaatcggtatgttagaacaagcatttcaaacacatcttcaaaaagagcagttctggcaagccggcgacaaggttgtggtggcaacgtcaacgggagtcgattcaatggttttattgtggttattgactcatctgccccaaaaacaacgaccccaagtcgttgtggctcacgttaatcatgaattgcgtgcgcaaagtacggctgaagaaaaatatttaacccagttttgccgattgcatgccatcccgttacgcattcaacattggccaaaagcgagtcatcctgaaacaggggttgaagcggcggcacgtcaatttcgctatgctttttttgatcaagtcatgcgaaccgaatcggcgcattacttggtgaccgcgcatcacggcgacgatcaactagaaaccttgctcatgaaattagttcgtagcggtgaattgcatgaaatgcgggggattcggcaagtcagaccgtttaaaacggggacgttaattcgcccgctattaccttttagtaagcaacaactgcgtgattacgctgatcagattggtttgaggtattacgaagatcaaaccaatcaggaacaaactgttctccgtaatcggatgcgacatgcggtggtgccacttttaaaacgagaaaatccacacttgattcaaaatgccaatcggttcagtcaaagtctgacccaaatggtggcacaccaagatgatctaaccgcggcgttactgccattgttggcaatcaaaaaacagccgacggcaattgaagggcgtttagaccaactcgatggcttgaaccagacacaacaaagggcgctctggcaattggtgtggcaacgatatttcaagactttaccggcgttaaaggcagcccagttaatgcaagtgcaacaattgttggcgaacccgcagaaaccgcaaggccaagtggcattgaacaatggcatcatttttgaaaagcagtatcggtgttttcggattggtgtccaccaaatagtggattctttggtcaaaacacgaacattagcgattaatgaatggctgcggttaaaaaatggcgaacaagttggtgttttcgatatcgaccatctacctaatcaagttcaacggcaacaggtcgtttggttagcaccagaggaatggccactgcaactcagggcgctacaagcaacagatcgaataatgcttgataaggcacaccacaaaaccattcaacggttatggattgatactaaaaccccacaggcaaagcgccaaaatgcatgggcggtttggaccccaaatcaattgcttggccggccggatttacggatttcggcgttgtttaatcgcgaacaaactggtaaaatacggtacatactatgttatttagatgattaagcaaattacggaggctggcacaatgttagaaaaagatattgaacgcgtattatattcaagagaagacattcaaaaggttaatcagcgcttaggaaaacaaattacagcggattatcaaggtaaaaacccgttattaattggtattttaaagggtgcgatcgtcttcatgacagatttgattcgcgaaattgacctccatgttgaaatcgactttatggatgtgtcaagttatggtgctgagaccatctcgtcaggtgaagttaaaatcatcaaagatttagatacgagtgttaaaggccgcgacattatcattatcgaagatattgtagatactgggcgcacgttgaattacttaatggcaattcttaaaacacgtcaagcaaactcaattaaagtctgcacgttaatggacaaaccaagccgtcgaattgtgccagttcattcggattatgttgggatggaagtcccaaatgaattcgttgtggggtacggattggactatgccgaacgatacagaaatatgggaacaattggcgttttgaaacctgaaatttattcgggtaaataaatggtcaataaaagtcagatatgttatagtttaacagtgtcaaaaggacactgtgtcacaaatgatgagaagcttcaggaggtcacgtatgaacaacaaaaagaatggactgtttagtaatagtctgttttacattattatcttagtggctttagtcggtgtgttctcgttcttcatgaacggtaacgctggatcagagtctaaggaagttcaatcaagtacatttttaagtgaattgaagaccaataaggtcaagtcattctcaattcaaccaacgaatggtatttataaaatttctggagaatatcgtaaagcacaaaaaacagaacagcctaaaaagaatcttttaggacaaaaaacaaaagcaagatcagttaaacacttcacaacaaccttattacaaagtgattcacaagttggggcaatgaccaagttagctgacaaatcagcaaccaaggttgaaacccttcaagaaccacaatctggttggtgggtaagtattttaagtcttgtattgccattgatcatcatgtttggtttattctacatgatgatgggccaagcgggtcaaggtggcggtcaaggcggtcggatgatgaactttggtaagtccaaagctcaaaaagccgacaagaaagctaataaagtacgtttctctgatgtcgctggtgcggaagaagaaaaacaagaattagtcgaagttgttgaattcttaaaagatccacggaagtttgctgcattaggggctagaattccagcgggtgttcttttagaaggacctccaggtactggtaaaaccttattagctaaagccgttgccggagaagcaggtgtgccattcttctcaatctctggttctgacttcgttgaaatgtttgtcggtgtcggtgcaagccgtgtccgtgatttattcgaacaagccaaaaaagcagccccatcaattatctttattgatgaaattgatgctgttggtcgccaacgtggtgccggcatgggcggtgggcacgatgaacgtgaacaaacattgaaccaaatgttagttgaaatggatgggtttacggggaacgaaggcgtcatcgtcatcgctgctactaaccgttcagatgtcttagatccagcgcttttacgtccaggtcgttttgaccggaagatcctagttggtcgtccagatgttaagggccgtgaagccatcttgaaagtccatgctaagaacaaacctttagccgatgatgttgatttgaaagaaattgcgcaacaaaccccagggttcgttggtgctgatcttgaaaacttattgaacgaagctgctctagtagccgctcgtcgtagcaagaccgatatcgatgcttctgatgttgatgaagctgaagatcgtgtgattgcgggtcctgctaagcgggatcgcgtgattaatcctaaagaacgtgaaaccgtggcttaccacgaagctggtcatgcgatcattggtttagttcttagtgattctcgtgttgttcggaaggtaacaattgtccctcgtggccgtgctggcggatatgccatcatgttaccgaagaatgatcagttcttaatgagtaagaaagaattaacagaacaaattgttgggttacttggtggtcggacagctgaagaaattattttcaactctcaatcaactggtgcttctaacgatttcgaacaagcaacggatattgcccgcgggatggttactcaatatgggatgactgataagctcgggacagtggcccttgaaaaagaaggtcaaccattcgttggggcagcttacggtcaaggcccagccttctccgaaacaactgcggctgcaattgatagtgaaattcgtcggattattgacgaagcacatcaacaagcacacgaaattattgaagcgcaccgtgaacaacataagttaattgcggaaatgctcttgaagtacgaaacattaaacgaaaaagaaatcttgagcttgttcaatgatggtaagatgccagaaaagaacgctgaagaattcccaagcgaaaaagcagctacttttgaagaagctaagaaggcgcttgaagcaaaagaagccgcaaaagaagattcagaaaaagaaactgataaaaaggatgtgacaatcacacctgatgaagatgatcaatcgacaccagctgaggataatcaacatccagacgatgaagcataaattgttacaccaaaaaggtcgacacgattagtggtcgacctttttgcatcaatccataaaagaggttatttagatgacagattatttaattaaacaaatttcagaagatggccaacttcgtgcttatgcagtgaacgcaactgatgttgtaacggatgcgcaagaaaaacatgacacatggtcaacttcatcagcagcgtttgggcggacgattgtcggcacccttttattgagtgctgctggcttaaaaggtgatacgaagatgacagtcagagttgaaggtgacggcccagtcgggaagattgttgtcgatgggaatgcgcaaggcacagttaaagggtatgtgacgaatccacacgttaacctaccattgaacgacaaaaataaaattgacgttaaaggtggcgttgggacaactggtacgttgagtgtcacgaaagatcttggcttaaaagaaccgtttaccggtcaagtaccattggtatcaggagaattaggtgaagactttacttactaccttgctaaatcagaacaaacaccatctgcagttggcgtttcagtcttcgttaatgaagataactcaattggtgtcgctgggggcttcatgattcaaattctcccaggggcggatgaccggttaatcgatatcttagaagcgcggctgaaagaaatgccgctggtgtctgaattactccaacaagggatgagcccagaggaaattatcactgaaattgtgggcgaactcccaatgaagacgttagaaaaaatacctgttaaatacgaatgtgattgttcaaaggatcggtttgcaaaggcactcagttctgttgcgccagcggatttacaacaattaatcgatgaagaccacggtgctgaagcggtttgtcgtttctgtggcaagcaatatcaatttacagaagcagaactaaaggcaattttagccgcgcaatagaatagtcgcaaatttttgcctgaatactatttttttgctatgataatttggatattgtcggaagacacgaagggaatgggttggcattatgacatggcaaataggagacgtgacgattccaaatcaagtagtcgtcgcaccaatggctggtattacaaacgcagcatttcgcgtaactgcaaaggaatttggcgcaggtttagtggtctgtgaaatgatcagtgatcgcggaattatgcacaataatcaaaagacaatggggatgatgtttgttgatccgaatgaacatccagttagcatccaaatttttggtggttcaaaagacaccttagtggaagccgctaaatttgtggatcaacatacacaagctgatattattgatatcaacatgggttgtccagtgaataaagttgttaagacagatgctggcgcgcgttggttattagatccaaacaaggtttatgaaatggtctcatacgtgacagacgccgtgaagaagccagtaacggttaagatgcggacaggctgggatgaagatcatattttcgctgttgaaaatgcacttgctgccgaacgtgctggtgcttcagcacttgcaatgcacggtcggacacggaaacaaatgtacaccgggcaagcagactgggacattttaaaacaggttaaatctgaattaacgattccatttatgggtaacggtgatgtccggacaccacaagatgctaaacgtatgctagacgaagtgggtgctgatgctgtcatgattggccgggctgcgctcggtaatccatggattttaagccaagtggaaacctacttacgaacaggtgaattgattgctgaaccaaccccatgggaaaaaattgcaacggccaagttacaattacaccgtttagtcgaacttaaaggtgaaaatgtggcttgtcgtgaattcagacaacaagctgcctattacttgaaagggattcctcgtgcggctaagaccaaagcggcggttaacgaagtggaaacggaacaagccgttggcgatattttagaccactttgtagaagaaaccgaagcgagaatggcaaattaggttccttatgttggtgttttcgtgttaaaatcaacattagtagataattgaatgtatggaggaattgtcagttgggacaaaaagataatcaaagagaaatgaacgaccaactaaaggtccggcgtgaaaagttacaattgttaaaagacgaaggaattgatccttttggtagtcgttttgatagaacacatatggctgcggaattacacagtgaattcgaagcaattgaaaaagacgatttagatgctaagaatctagaagtcacaattgcaggacggatgatgtctaaacgggggaaagggaaagttggctttgctgacatccgtgaccgttcaggtaaaatccaaatttacgtgcgtaaagatgaagttggcgaagaaaactatttaattttcaaaaaggctgacttaggtgatcatttagggattactgggcaaattatgaagactgacatgggtgagttaactgttaaagcaacgcacctgactttcctatcaaaagcattacgaccattgccagataagttccatggtttaaccaacgtggaacaaatctatcgtcaacgttacttagatttaatcgcaaatccagagagcttggatcggttcacgaaacgcagcaagattatttctgctgtccgtgaatatttagataacaatggctttactgaagttgaaacacctgtcttgcatggtcaagctggtggtgcatcagcacgaccatttattacccatcacaatgcgctagacatcaacttgtacttgcggattgcgcttgaacttcatttgaaacgattaatcgttggtgggatggaacgtgtctatgaaattggccgcgtattccggaatgaagggattgatacgaaacacaatcctgaatttacaatgctagaaacatatgctgcatactttgattataaagacgttatggatgaaacagaaggtatcatccgatttgcagcgcacaaggttttaggaactggtcagatttcatatcaaggacaagcgattgatcttgatggtgattttggacgggttcacatggtcgatgcaattaaggaaaagacgggtgtcgatttctggcaaccaatgacggttgaagcagcgcgtgaattagctgatcaacaccacgtgaagtatgaatcatactggcaagtggggcacatcattaatgcgttctttgaagaattcgtggaagatacattggtacaaccaaccttcatctatggtcatccagttgaaatctcaccattggctaagaagaatgctgaagatgatcgttttacagaccgttgggaattatttatgtacggtaacgaatatgcaaatgcctttactgaattaaacgaccctatcgatcaacgtgaacgttttgaagcacaagctaaagaacgtgaaaatgggaacgatgaagccgaaggaatcgatgaagattacatcgaagcattggaatacggaatgccaccgactggcggacttggaattgggattgatcgactagtcatgttactgacagatgctgcatcaattcgggatgtcttattattcccaacaatgcgtccagacaacaataataacgattaagattaaactaaagcccgcaagcagacgatttgcttgcgggctttttttattgaaaaaaattgggattataaaaagtttttttagtgtattttgtgggtgaataagcatcaactttcggtatattatgttgtttgcgcgagttgttcgtttaatagttcatttatttgcataaattgcggatactatcgactgtttagattatgaaagttcataaataacagttgagattaatagttgacgaaaggctgtagagctgatatagtagtctatgttgtcagcgagataaaacattgttgctaacgagtcaggtaattaaatcagtttgaatatttattcaaaaaacatttttattaccaagtccagttgctgcgcgtgctggcggatcttcgggtggctctggtggttcgggtggtagcggtggtgggtcttcaccgacatccagttatgttggcggccgtagtcgtgattattattacgatgatgcgggatgtcggcattactacaagtccctaatgcgtcgtttattcgatagtatagtcaccctgcctttcgtattcgtctcccttgggatcatgatttggcgtaaagtgcgtgactggttaaccggacgtagaaaacgggcactggctgataccatgccgttagatgctgaaaccgcggcgcgctttgaaaatgcattctatcaaattgaaacagcttggccctcaaatgacttaagcaacgtggcggacttaatgacgccccattttcagcaccaacaacaacgcatcttaaaccgttatcaacggcaccataaacataaccaacttgagagtatcgccattgtttcaactgagttattattacctgaaaaaccgaaccgccaagatattctagtgacagcgcaaatgcgcgattacttcactgatgagcggcagacagccacggttaatgaccaacgtcgtgaagcggcttatattgaacgtttcagcgaaatttgaacgtttaaattaattgatggtcaatatcgtgtcgctcatattaatcaatccctataaaagagctaccagttggtggttcttttttgttatttaattggttaagtttattgcgttaaacaactttttctcttaaaatagaccttatcgatttaaaaattgtttatccattttgattagaaagtgaggtcatttgatgaccctccatgttggcactgaccagacacaaacggccgtttccttaatgccgcgtaacctagacgattgtgtgcgtgaaatggtactcgttgagcaaaagcaagctgcgattgatattctagaatggcgcttagactattggcaaacaccagcgaccttattaacggctggtcaccaaattgccgcctgcaagcaccccgttattttaacgctcagaacaacccatgatggcggcctgtctgatccaaccgactatttagaccgctatacagctctattatcggctcaaatcggcgatgtggttgatattgagtggtctttacctgaggcagttagaaaagccgtcagcgcgcttgcacgtgcgaatggctatcaagtgttactaagccatcatgatttaaagacaacccctgataatctaacacttcaaaaacaactcgcagcaatgcatgcgacgcacccagatatgttaaaactagcaactaccgctcaaagtaatgaggatactactcggttaatggcgattacccagtcttttacacatgatcacacaaccccactgatcacgatggcgatgtctgaatttggcttagcctctcgcatttttggtggtcaattcggttcagctgtgagtttcggttaccttgaacaccccagtgcaccaggccaattacccattgaacaactcaaaggcttgttgacaatgcatcaaaattaaccgcacaaaaaaagccccgcacaaattcaatttgtgcggggctttttagattgttgattagttccgttcaacgtttaaatcattcatcttaagcattgtatcaacggccttttccattgtttcgattgaaacaaattcgtagcgaccgtgcatgttttcagcaccagcaaagatgttaggggttggaatacccatgaatgaaatcttagaaccatctgtcccaccacgaacaggttcgattaatggtttgatatcaacggcttccattgcatctttagcaagatcaacaacgtccatgtgatcttttaagacttctgccatgttgtagtattgatctttgattgttgcaacaacgcggccttcaccgtatttagcattcatttgatcagcaactttagcagcaaatgctttgcgttcttccaaaccatcacgttcgaaatcacgaatgatgtaagccatgtgtgcttcatcaactgtgccttcaaggcttaataagtgatagaaaccttgacgaccgtctgttttttcagggacttcatcgcttggtaaagcattttggaaatcaacagccacttgaagggcattgatcatgatgtttttagcttcactaggatgcacgtttttaccttgaatatcgactttcatggcagcagcgttgaatgtttcgtattcaagttgaccgattggaccgccatccattgtgtaagcaaagtcggttgcgaaatctttggcatcaaagtgatcagcgccagttccgatttcttcatcggggccaaaaccaatcttgatgtcgccatgtttgatttcaggatgttggactaagaagtccatggctgtcatgatttcagcaaccccagacttatcatctgaacctaataatgttgagccgtcagttgtgattaaagtttggcctttataatttttcatatttgggaattctttaggatctaatacgaatttacccgcatcatctaatttaataattgattcgccatcatagttttcgacgatttgtggattgacacctttggcattgaagtcggcagtatcaacgtgtgataaaaagcccattgttggcacttttttatcaatattacttggtaatagcgctgttacatagccattactttcgttgtatttcacatcacttaatccgatttccttcaagtcgtccatcaatttgtgtaaaaataccacttgtgtttgggttgatgggctcgttgttgcgttttcatctgaacgtgtttcagttgtgacatattctagaaaacgaggaatcaatttttcatatttagccatggtgtagcctcctagatattatttaatactaattctattctaacctacttcgcattaaaaataaatgtaaacggatcagttttttgctgtgatttaatgaatgtaaccgaccaaccacgctgtttggcccacttttcaaaaatttctgtcatcttatccttcacaatactttcgacatgatgaccaggatcaattactgacaaaccagctgccaacatatcgtgaccagtatgataatacacatcaccggtaatgtagacatccgcaccagcttgtaaagcggctgggaagaatttacccccatcgccaccgacaacggcgactgtctgaactattttgtccggttcatttgaaattaagcgcagacctgttaaatcaaatgtttcgcagacaaattgcgcataatcccggaccgtcattgattgagcgacttgaccaatgcgcccaataccaatcggttgttgttgattagctaatggaatcacatcataaacgggttcttcataaggatgcgccgcaagcatcgcctgaacaactttggtttgcatggccactggcagaacaacttcgattttaacttcggtaaccgcttctagatcacctgattggccgatataaggatttgctgcgtccgttggttgaaaacgccctattccggtcgtactaaaactgcaggcttgataatcgccaatatgtcccgcatcagcttgattcaatgccatccgcatctgttcagcatgtgactcagggacaaagaccaccaattttactaatgattggtagtccgtgatgttaaacggttgcacatcgtttagttgtaaagcttcagctagccaatcattcatgccgccgttagtcttatccaaattcgtatgggcggcatataccgtgatgtcatgcgttaacagatccgcatacatcttgttttgcggatcacttagatcgagattccgcgctgggcgaaacattactggatggtgggcaaaaataaaatcaacattctgttcaatcgcttcttgaacggtttctgggcggacatcaagggttactaacacccgttcaatgcttttatcgcgtcgcccgatttgaaaaccggtggggtcattgccttcttttaatgccaatggtgcgtagtcttcaatcgcagcaattaagtcactcgcgactaattttcccatgtcttcatctcctcgattaatgcaatttcatgttcaactgctttgactttatcagtaggtacgacttgtgcgttttgtaattgttgcaataaatgacgccgttttttcaacattgtcccccacttcaattggaaatcagcaggttgtgtttggcggagaacagggccaaacactcgatcactttcgcttaatggtgcaactgatggttggggttcgccaacaatcacttcgtagatatgcccgtcttcagcgacaatcgcttcatcaacgattacatagtcatgtgcattcaaccattcacggacagtactttccatgatattgggttgtaacacgagtcgttcatggccgttcagatgatccaatccacgggttaaaatttccgtgatcaataaaccacccatgccggcaatcacgatgcaactcacatggtcttcttcaggattcaatacctcgacgccatcgcctaagcggacttgaatctgttgttgtaagtgccattgattaacgtgagtctgtgttgattcaaacggaccggcaactacttcaccggcaatggcgcccttcaaccggttttgttccgtaagccaaattggtaaatatgcatgatctgaaccgatatcagcaacaatgctatcttgtgggacaaactgcgcaaccgcagctaaacgctttgataaatgaattggtgacaaaaataaaactccattctagaaactttgattgttatagttagtataccaaattttagacggcatacgcagtcaaagtgaacacttgattctggatagcagaagttgctttaggcaaaatttagttttatactgaaattaaatcgaaaacgctttctatacattaaggagtggtctcatgagttggttgcaactattctgtgttttcatgattggtttaggcatttttcaaatttataagtcgtatcagtattatcaagacttaaaattacacgcagatcaaaatacttctgtctttgcgccagcagcgctctgttcgagtgctttcatggggcttgtctttattgggattagtcttgctagtttattgaattggttataaacgtcaattagccccttctttttgagctttattagttttcggaaatcctagttaacataagataaattatttacagtgaagggggtggtaacatgaactggttaccaattattgggattttaatgctaatcatcggtgttttccaactttcaatgaccattaaaacattcaagactttgaaggttgaagcaaaccacagtacttcagtcttcatgcccatggcgttatggtcaggtgcattgatggggattgtatttttagcagtggggattggtgctctgcttgtttagatacacgcaaaaaaggccgcaagctaggttagcttgcggcctttttattgattgcctaaacgtgctttttagttcaacaacttccgcttaatctaacattgccattaattctaaaatctgaattaatgacaatattgtattaatgctcagttgctcccgtaactaaacgcactttatcgaaaacgtgctctagcaggcatatttctgcggctagctacgtcagtcaaacaaccaacatcgttggttattcgcctgactatgctaaccctcaaaatatagccgcctgcttacgcactcttttattctaaaaagtcttttaattgttttgaacgtgatgggtggcggagtttccgtaatgctttggcttcgatttgacgaatccgttctcgcgtaacgccgaacaccttacccacttcttctaatgtccgtgtccgaccatcatcaaggccgaaacgtaaacgtaagacgttttcttcacggtctgttaaggtatctaggacactttctaattgttctttcaacaattcataagaagcatgttcttcaggactggttgcatcttgatcttcgataaaatcgcctaagtgtgaatcgtcctcttcaccaattggggtttcaagggaaacaggttcttgagcgatcttcaagatttcgcgcaccttatccgtattcatatccatttcagcaccaatttcttcaggcgttggttcgcggcccaaatcttgaagtaattgtcgttgaatccggattaacttgttaatcgtttcaaccatgtggacaggaatccgaatggtccgggcttgatcggcaatcgcacgcgtaatcgcttgacgaatccaccatgtggcatatgttgagaatttgaaccctttacggtgatcgaatttttcaacggccttcattaagcccatgttcccttcttgaattaaatccaagaattgcatgccacggccaacataccgtttagcgattgaaaccaccaaacgcaagttagcttcggcaaggcgttgcttggcttcttgatcaccttgttcgattctcaaggctaagtcaacttcttgttgggcgtttaaaagagatacccgcccaatttcttttaagtacatccgcacaggatcgttaatcttaatcccggttggtgcagtcatatcttttaattctttagcagaaaccttttcctttttaagggtagcggcacttggattcccatcttcatcgacaatcccaatcccttggtcttccactttttgcattaattcattgatttcatcagcttgtagcgcaaatggtttcacgatttttgcaacgagttcatcattggtgatttctttctttggtttgtattccttaattaaagccttaaccgcaatatcaaatttcttcgtgtcagcttttttattatcagccattcagaaacctcctaatatcaatttcctaatttcttttgcgaaacaagtctaatgacctccagggttaagcgcgtttcttcgctcgcattccccaatttggtcgcctcttttaaggcaattttcgcttctcttaattgttcctcaacgttattttgcgcaatgacgaacagacagtcgtttaacgcctcttgacttgcctcttctggtaagtcaagcgcatcaatctgaacgactaaggcttgtaagtcatctgggatataacccatgaagtcggccaaggtcgacttaccttcagctaaaaaggcgcgccataactcgtaaatcagttggtacggggtatgcacaaaactaaaatcggcattgttctccaattgcaggcgcatatcgtcattagccatcaacatatgcaacacttcttgctccgcgtgttcaacccgggttagccgttgtggctgacgcgtcgctgttgcccgcggatcaccaatgattggcggtggtccacccacaaatgcgtcatccggttcaggtggcatgtcataatcatactgactagatgccggtgcaagtggttgctgcgttgcccgtttaacgcgcaatgtttgtaactgccgcttcaacgtatcaagggtaatgccgctatcggcttcaatttgcttgaggtaaatctcgatttcaagcggcgaatcaattggcgcaacgacggacaatgcctgttgcacgtaatcaagttgatccttctcgttatccagatttaacccttgcttcaaataccgcagttcaaatgcaatcggtgtttcagcaccattttgcaaggttgtcttaaattgttcagcaccatattggcgaacatattcatccggatcagcgccactgggcaaaaccaccacactcaattcaagcttggtattttgctgcaacatggtaattgcgcgtttcatcgcttcgattccgggacgatcaccatcataacagacaattaattcccgagcctgttgccctaaaattcccaactgctcagtcgttaaactcgtccccattgaagcgacaccgtttgaaacaccggctgaatacgctgcaatcacatccataaacccttcaaacaggtaaactttgcgttcttggtgaatagcagtctttgctaaatcatagttgaacaaaaccttccgcttgttaaaaatcacggtttcaggactgttcaaatatttgggttgatctggttgtttcaccaaaacccggccagaaaaagcaatcacttcaccttgcgcattccgaatcggaaacatcactcggccggaaaaacgatcatgcagcttgccggtctgagtttcaataaataagccggattgacgtagtgtctggtacggaacttctttattctggaagaatgaaagcattaaatcggtttgatccggtaaatagccaatactaaacgtctcaattaattgatccgtcaagccccgttcgtgtaagtaatctaacgctggttggcccgcttcagtactcattaaaatatgcgtaaagagttcattggcctgacgatagagttgcttaaactgcgtcacttcacttgattcttgaacattttgagtgggtcgataagtctccgctaaactgaagccgacaaagtcagcgatttttgtaacagcttctggaaaactaatctgttccagttccatcaagaacttgaagacattcccaccccgtccgcaagagaaacaatgaaaaatctgtttctcttcactaacggagaatgatggggtcttctcatcgtgaaacggacaaatcccaaataggttattgccgctcttcttgagctggacatactgaccaacaacatccactatgttagtttggctccgaacatcatcaatcacgtcattcggaatctttcccgccattggtctcacctcactattcaattcaaattgtactaagactgtaaaagccgcacctcacaatgaaatgcgacttttaaggattatcagcacaaaaatacactatatatcatagcaccatttaggtacagttgcaaataaatatagcaaactatctcattcgttgtcaaggtcctttttcaaaagtcccattaagatgacaacgtgattatattgcaggtcctttgccgcatagactaatgtgacgttgcccagctcaaggtgctcgtgcactaccttttcaaacgccggccaagctggattagctgcaatttcagcaaggtacttttctttaaaaacgggaaacttagctggctcatgaccaaaccacttgcgtaagtcagtcgttggggtaatttctttcgcccaggtctcaatagcggcgcgttcttttgaaatgccgcggggccaaatccgatcgactagaattcggtacccatctgagtctgtcgctgcttcataaacccgtttcatttgtaacatgctattatccccttttgaattgtttatttaacaatcaattcgtttaaatcacctaaggtaagggcgatttgagcgataatcatcaactgtgttaagcgatttcgacgaacagcttcatcttcagccatgaccattgtggcatcaaagtaagcttcgattaatggtcgtagtgtttgtaagatgccgtaattatcagctaatgggttcgtagcaattgtaccacgtaagtcttcgaccgctgtgtgaagtgctttttcagcttcattttcgaataatgcaggatcaaccgttaaatcagttgttgcaaagtcaactttttcagcgagtcgtaacacacgtgtcacggcttcaaccgttgccttgaaatctgcatcatcttgatggtctgaaagcactttggcagcttcgaacatcacgactggatcttgactttgattcttcaagacggcatctacgatatcacgccggactttaggccgcatgccgttaaagcgttggcgaacacgatccgttaagaaatcgctgatcgcgtcagcattggttgaccaatcaaggttgaaatcagcttgttgcttaacaatgtcactcatcgcagcttgataatcggccattgggaagtgccagttttggttttctaagatgcggataatcccataagcttgacgacgcaatgcataaggatcgtttgaaccacttggaatcatgcccactgcaaagaaatcagccatactatcgaacttatcagcgattgctaaaaccgcgccgacctttgttgcagggagtgcaccttcagcactaattggcatgtagtgttcgcgaatcgctgtggcaacggctggtgtttcaccttgtaataaggcatatttttcacccatgaccccttgcaattcggcaaattcaccgaccatgccagtcactaagtcaaatttataaatatcacttgcccgttgcaaatcaactaattctgcttctgataaaccaaatttttggcctaagaattgcgcgattaaaccaacacgggtcatcttttcagccagactaccaatcttgtcgtggaatgacacgttttgtaacttcgcaacgttttgttcaatcgttaccttttgatcttcatggtagaagaaatcggcatcttccaaacgcgctgtgaggactttttcgttcccagcaatgacattttccatgaagtcggtgttcccgttgcgaacaccgatgaaaacaggtaataaatcacccgcttggctgcgtgcgtagaagtaacgttggttatccttcattgaggtaatcaacacttcttctggaatttcaagatacttaggatcgaattgcccataaaaagcagttggccattcaactaagttcgtcacttcttctaacaagtttgcgtctaaatcgacttgccaatcgttttcttgggccattgtttcaatctgagtttgaattaagttttggcgtttagcttcatccgcaattacgaattgtgcttccagcgttgcttcgtaatcagttgcttttgccaatatcacggcttgacctaagaaacggtgcccttgtgttgtgcgaccagtcgtaacgtttaaaatactgaaatcgataatttcatcgtctaataaagcaacaatccagtgaattggacggatatattcgaagtcgtaatcggcccagtgcatccgcgttgggaaggtcatcgccataatcacggcttttagttctggcaaaattgtttcaacaggtttgccgatgattgatttttcaacatagacgtattcaacgccttttagtgctttaaaagtaatgtcgtcggtcgttaaaccttggccgcgaacaaaaccttgcgctgctttactccagttaccttcagcatcaagcgcaattttcttagcggggcctttcgcttcttcgtgaatgtcagcttgcttgtccgctaggtcttcgatcaagacggctaaccggcgtggtgttgcgtaagttttgatggtcccgaatgttaagtgttgttcttctaaaaagtcgcgtacgcgcttttctagttgttggatgctaggcatcacaacgtgggctggcatttcttccaagccaatttctaataagaatggtttagtcattgttaacgacctccgtgtttgattcttgagcatgttttaagagcgggaagccacgtttctcacgttcagcaacgaatgcttgcgcgattgagtgcgccatccggcgaatccgtgacaagtaaccggcccgttctgtaacggaaacggcaccatgggcatccaataggttgaatgtgtggctacatttcaagacatagtcatatgctggatgaacaaggcctaagtcaattaaacgttttgcttctgtttcgtattcatcgaagaatttcaaaagcatgtcttggttactgtcttcaaaagcatattttgaatgttcatattcaggttctttaaaaatatcgccatataacacgccattgccccattcaagttcgaacacgttgtcgacatcttgaatgtatgaagcaagccgttcaacgccatatgtgatttcacttgtcacaggatcgcattgcaaaccaccaacttgttggaagtaggtaaattgagtcacttccatcccgtctaaccaaacttcccaaccaacaccggcacaacccattgatgggttttcccagttatcttcgacgaagcgaatgtcatgttccaaaggatcgatgcctagagcccgtaaactatccaagtaaaattcttggatgtttaatggggctggtttcatgaccacttggaattggtgatgttggaataaacggttggggttttcgccataccgaccatctgctgggcgccgtgaaggttctacgtaagctgcgttccaaggttctggtccaattgcccgtaagaacgtgtatgggctcattgtgccggctcctttttctgtatcgtaagattgcattagcatacagcctttttcagaccaaaaacgctgtaaggttaaaatcatttcttgcacatttaactttttaaccatttcaattcctcttttccgtattttgcgcataaaaaaagcctatgcgactgttaagtcacatagggacgattactcgcggttccaccctacttcagctcaaagcgagctgctgcttcattggtatgactccgaaacgccaatccactcaagtcttgttctagttctcactcacctagaatcactgtctgaccgtcttaagggacccttttcttcaacgtctattaagttgattactattttagtcgtcttttggcgtgctgtcaatttctgacgacactttttttaattgtggtaattgactatcgaaactgtacatcttatcgatgaattgcttactcttgagcgataggccaaccgtgtcttgataaatccggtcgatcatcgtcttaagctccatctgcgttgtctgtttgacgttgaccgattgaatcttgaataaatcaatcactgaaaaaagacgcagataatagatagcccgttgactaccgtggaatcgattaacatccaagtgccagtggcgttgacaaagcagcccgccataactctcagaataatcaaacggcaaatcagaacgcccacaaaccgcacagacttgcagttgtggctgcaccccgaagacttgtaacatctgaatctcgataatgtgcgtaatcatcgccgcgtcaaagccttcatcgattaatgagagtgcctgttcaatcttcggataccaactgccgagcggttcgctatccggaaaaccaacatcgactaagcctaagatataggtcgcataggcatttaaaaacaagtcattgctaatcgattgaaactgactcgccgacttgacattatttaaaaaggataagccatcatcgcgaatgtcgccaccgtactcagcttgggtaaatggcaaaatagccgcactcaagcgaaacttcggtttattcgcaccgcgtaagtaaaacatctttttgccaaagcgatcggtcaaaatcttgaccagcatatctttttctttatagttcttccgatacatcactagaccattaaagtcttcgaatcgatgttccgccattgcttaagcctacaatctctttttattgtaaccaaattcacggaggtattggttattgtcacgccaattcttttgaatcttaacccagagcttcaagttgactttttcgccaagtaaagcttcaatttcgcgacgtgaccgaatcccgatttctttgataatggagcccttttgaccgatgataatccgtttttgaccatcacgttcaacaatgatattcgcttcaatctggagcttaccattgacgcggtctttcatccgttccacaaccacggcaacagaatggggcacttcttcatgcgttaattcaagaattttttcccgaatcaattcaccaacaacgaaatattctgggtgatccgttaattgatcttctgggtagtattgagggccttctgggagtatttgttccaattcttttaacatttcagggacattgttaccttctaatgcagagattgggtaaacccccttgaaatctaattcatgccgatattgttcaatcattggtaataaatcgtctggatgaatcgcgtcaattttgttaacaaccaaataaacgggttttttgacgttcttcaattggtccatgatgtattgatccccaggcccttttttatcaatcccactaatcatgaataaaatggcatcaacttcgttaaacgtcgatagcgctgcttgatccatgtattcatctaattcattatgtggtttatgaatccctggtgtatcaacgaacacgatttgcgcgttgtcatccgtgtagatcccttgaattttattgcgagtcgtttgtgcttttgatgacatgatggcaattttttcaccgatcattcgattcataaaagttgattttccaacatttggtcggccaacaatggccacaaagcctgagcgatatgtttctgacataatagtcccctttttagttaaatatggcgtgtccaaagacaatggcgccaatcaatagcgctaaaattgcgctgattaagacactggctgcactgatatctttaatctgcttagccaatggatggtactggtgatcgactaataagtccacgagatgttccataactgtattccaaaattcagccataaaaacgataaaaatcgcgaaaataatcactaaccaatctaaataatgtaactgacaataaataccgaaagcaatcgcaacgagtgcaaaccaggcatcacgccgtaaattagcctcagttttaaaggcggtccataatccaccgagtgcgtggcgtagtgactgccaaaaatgtttattcttgcccgtttgtggttttttaccgttgtaatccaaattcatcgaggatcttctcctgtaatggaatcatttgtgcttcatcttcactatgaatgtgatcataaccatttaagtgtaagaagccgtgaaccattgtgtaccctaattcacgttcaaatgaatgtccataagtttcagcttgttcagctgctttttctaatgaaacaaacaaatcaccgatattcttgggaatgtcgaatagttcttcaaagttggctggtaatccttcttcttcaggatcttcttcgattgcaaaactgatgacatcagtcgcacggtcagtatcgcggtattccttgttaatttggcgaatgcgttcgttcgtcacaaacgtgacagacatttctgtgtcttcaggtaaatctaattgttgcccggcatattctaaaatatccgtgaccagttttacgtttgcttctgcaactacttttgtttcatcgataatttggatatccattcaagtgttcctactttctcatcttttcaatcgccgcataggcgttaataatcttagcaacaactgggtgccgtaccacatcttctgaactgaactgtacgaaagcaatcttaggaatatcgtgcaaaatatgttcagcttgcaccaagccgctcattgttttcttaggtaagtcaatctggctaatatcgccgttgacaatcatcttcgagttaaacccaagtcgcgttaagaacatcttcatctgagcaggcgttgtattctgggcttcgtccaaaataacgaaagcttcttctagtgttcggccacgcatatacgcaagcggtgcaatctcaatgacaccacgctctaacaaacgttcagtatgttctttacccaaaacggcatacaatgcatcataaatcggtcgtaaataagggtccaccttttcctttagatcacctggtaaaaagcctaaactctcaccagcttcaaccgcaggacgcgttaaaatgatccgttcgactaatccttgtttcaacgccgcaacggccatgacaacggctaagaatgttttccccgttccggcggggccaatcccaaacgtgacatcgttttgacgaatcgcattcacgtattgacgttgaccgaatgtcttcacgcgaatatgctgccctttacgatccttgattaatggctccgtgtaaagttcttggaaaccagcaatcgtgcctttttgggccatcttcgtcgcactcaccacatcactactattgagcttaatgccatgttgtaacagcgccactaagttttctaaaacagaagcggcttggtcaactgctggttgttcgccgcgaatggtaatatgctcgtcaaacgcaatcagttcgacagataagctttcctcgatgatttttaaaaaagtatcgtgtgtgcccattaaagcggccgctaaatttggcgttgccaattgaaataaacgctcatctgtttcagccaacaaagataactccttccagagtgtgactgcaactgattctgagtattatctagcccagcaaataaacgactttagtcgattattaactacacgtcgtaaagtgaagaatcaagttgcaaccgcacgtttcaacttcatttgttttagaatgaaaactaccatcattctatcacaaacaacaaccgttttaaaagtagccagccgcgctaattcacgaatttatggtcaattatcaaaatctgaattaacgaccataaaaaaaagcgggactccccagaggaagtcccgcctaaaattaacttaattttgatttaacgacttgattgaccatagcgccatcagctcgtcctttgaccttaggcatgacatattgcatcaccttgccaaagtcagccttacttgtcgcaccagtagcctgcattgcttcgtcaacaatggtgaccactgctgcttcatctagctgctctggtaaataagcttgtacgatttcaatttctgcttttgtttgttcagcgagatctgcacgatcgcccttttcaaactcagctaatgaatccttacgttgcttaagttgtgatgatagtacacttaattcttcgtcagaagataagtcttgccccgcactaattttggcgttagttaaagcggtctttaaactccgaataacagctaatcgcaacttatctttggccttcatcgccgttttcaaatcagaacttagttgttcaagtaaactcattcaatcatttcctttatctaagaaattagaacttcttacgttttcttgcagcttctgatttcaacttacgttttacacttggtttctcgtaaaattcacgtttacgatattcttgtattgtaccagcttttgatacggaacgcttgaagcgacgaagagcatcatctagagattcgttactgcgaacgactgtcttgcccatatgatatccctcccctcgcgtgctaagtataaccgtttacgttcgttaaaaatttaacttcacgtgaaccgttctttgctattatagcgaatgttgaaaatacggtcaataacccacagggaattaattgaatattttttcaaatctagcgattttttcgataattatggtatgatagcgctataaaagtgaataaaggagcatgccttatgccagaatctaaaccattaaccgtttttgtgctttcggactcagtcggccaaaccgccctccaattagcacaagcagcgctcgcccaatttccggacgttaaacctgatctcgtccgcttccccttcgttcacacgcaagagaaactcatggacgtcttaagcaaagcggttcctgaagaaacaattgtggtccatacattagccactaacggtctttctgaaatcgccgaaacctattgccaagcgaaaaaaattgccagtttcgacatgatgtcaccaatgacacaaatgattactgctaaaaccaacagcacgccaactggtgaagctggggcactacatcatttgaacgatcgttattttgatcgcatttcagcgatggaatttgctgttatgtacgatgatggtaaagacccccacggtttcttagaagcagatatcgtgttgctcggtgtttctagaacgtctaagacgccgctgtcgctctttttagccaatcggaatatcaaggttgccaacttaccaatcgtgccacaagcgcacattccagacgaaatctggcgggttgatcctaagaaaattatcggcctgatgaatacaccagaagtcctcaataacattcgccgggaacggatgattgcttatgggttaaatcctgataccacttattcagacatggacgaaattaaagctgaattggctttcgcccaagacctgtatgataagattggttgccaagtgattaatgttgccaaccgttcgatcgaagaaactgccacaattattcttgaacgcatgggcctcgattttgcgggcagtgcgaacgatcacgtcaattaaaaaaagcgttcaaatctgaaatcgatttgaacgcttttttaatttgttaatgtttaatcgttaaaaaactcgcaaccgaactacgctgcgaatgaaacgcattaatcatcccttcactacggtaccccatggcaatcccaccaatcaacagttcattttccggaatacccattgctttgcggaccgcatctggatacttggccgtttcataggcaggaattgtatcaatttgttcgttagccgcggctaacagaatcgactgactaaaagcccccatgtcataaatcatccatggcgaaactttgcgctcaaccgtcaagtaagtcacggcgggcgcgttgaacagatggcgttgtaaatcgctaaaattcgctaacccgtcttcgccaagataggcactgatttcatcattccacacgcgactgttctcagccattaacggtccccagtctgtccggtgaatcacgtttaaatcagagtagcctttcatccggtttcccgttcgttctaaatgatcggctaacgtttcacccgtcgctacatagactttccaaggttgtgaattcgtccacgacggtgttcgttgggcggacaccattattttttcgattaattcatccgagatcggtttgtttgggtcaaatgcccgaattgccttgcggtgattaaccacatcgttaaactccatgtgctttcctcctccaactaacacttatttagcgcgttaattacattttaataacgctcataataccagtgtgttggcgtttcacctaatcatttgattggactagaaagtcccaccaccggaaccgccaccgaaaccgcctgatgagccgcctgaaaagccgccagaaccaccactaacacttgttggattagcagcactgaccgcactgccaacactactattgagagctgttgtaaaggattgaccgatgttcaaccccccagtatacccgtagtaataataataacccagaggcattgtttgaagttgttccggcgtcaatcgaatcttcaaagctttaacgaccttatcagcaatcccgaaggccgttgcataactcaaatatcgatcccacaatagtacatctgggacattcgccatatcgagtgtcgaaatatcctttagcatttgtttaaagccttgccattcgccccgtttttcgtaacccaattgcgtccatagttgcaaattaaatctacgccagacggttaaaatgaagacaagccccatcggaatgagcgtccaccaagcaactaagccaatcaaagcaccaaaaatcaaaattaaaaatagggcgccaaggccgattaaccaataattcaaactggtcattaactcagcgatgtgttctcgtaaccacccgctacgacttgcttcagtcgccactgctgtttgccacccatggtaatgttgattgaacagttttgcactatgccgttttggatatttctcaatctcaaatagactgacatgctgcccatcaccaaccacatcaaatagccagctaactaacttcttttctgaatgtgataactgattgcgattgacgagcgttaatgaaaattgcggcatttttttatggaatagttccttctttggttcctgaacatcaattgttagattctttcgagcaactaagtctagaatcgttgcggataagctctccgcccctgctgtctccgtaattggtaatgccaacaactgacgcacaaccgcaggcccattttcatctggcaaatcatagacgtgttctggtgcctgtccagtataagtcatcacaggaagcgtttttcgaattttacgtaaaattaacaagaacatgccgggcgctaagaccactgctcctatagataaaagccaataacggcgtttttgtgctttgcgttcttgattagcttgttgcgccaaacgtgcttcttgtttgataatggctgcccgacgtgattgatcaatctgattcggattcgccgcagtcaccgccgttggaaaaataatatggctttcgacaaattggtttgctggattattagcgagtttaattgttacccggcctttatcgggttcaacgacttgttgcccatctaaattgccgtgcgtccatgatttgaggtctgcttttttgaatgtggtaggtaattgtattaccacttgaacgttttgtaagtcactatcccacgcatcgccaatcactttccaattcaattccgccgtatcacgataattaataatcagattttgtaactgatatttcaaagtaaccgctaattgattgccatcttgtgcagtttggtatagtttgaaccgataattttgttgtgtatcagttaagctataggtgccttcagtacctgattcactttgactaaacggatgaccattaactgcgacttgcgggttaaccaacttctttggttgaccaacgtttgtttggagattctggttgatatagaccccatggatatcatcttggatatcaaacaccgttttttgttcgacctgagcactcccatcaggttgtacatcaacgtttacctgataacgactgatgtcataggtatcggcagcctggactggctggctaaaaataaaggtccaaaacgccgctattaagataaaaataccaaacttagttcgttttaaattcatagtttgccttcgttctgctcaaccttcgttaataaatcagggtcgaattgccccgctttgagcatcgcaatttcatacgcatatggtgcaaagttatgcttcttatcttcgccaacatatggggtttctagaattttaggcacattaacgagttgttcatgctgtaagacatggtttagcgcatcaaatccgatttcaccaaaaccaatattggcatgacgatctttgtgtgcgccttgtgggttcttagaatcgtttaaatgaacaacttttaagcggtccaaaccgataatgtgatcgaattcattcaaaacgccatcaaaatcttcacgcacattatatccggcatcatttgtatgacaagtatcaaacgtcactgataacttttcattgtaagtcacgccatcgatcatctgtgcaagttcttcaaatgaccgcccgacttcggttcctttacctgccatggtttctaaggcaatttgggcggtttgatcaggtcgtaaaatttcgtttaatcctttgataatttgttgaataccagcatctgcacccgccccaacgtgtgcacctggatgcaagacgatttgagtggcccctaatgcttcagcgcgtaacacttcttcttgtaaaaaagagaccgcaaacttgaagttctcaggcttcactgtattccctaaattaacgatgtatggtgcatgaacaacaattggacctaagttgtgagcttcaatatagggttttgctgcttcaatatttaattcttcgattggtttgcggcgcgtattttgtggcgcgccggtatatatcatgaaggcatttgcaccaaaatcaactgcactctccgctgaccctagtaacatctgcttgcccttcatactaacgtgactccctaataacattccactacctccatgcattttgattacctagattgtcacagaaagcgcaacaaaaagcaagacgaaacctaacccataaaaaaagcccgccattcaattgaatggcgggttatcttatttaatcttaggttcatagaaatgcccgagaattttgacagcttccgtcatgctgacgaatgcgtggtcatccgcttgtttcatgaccatttctaaatcatgcatttcaaagcgagaaataacggtaaataacatcgtcttttcttcacggttatatgccccttctacgtcgtggacaatcgtaatcccacgccgcatttcgtcttgaatcatttgaatcacaacttggggcttatcggtaataatcatcacttgcagtttttgttggcgcgtataaaccatatcgatgactttgccgttgacaaaaatactcaagatactatagagcgcatgttcccaaccaaagagaaacccagcggcaaaaacgagcgccacattaaacatgatattgattgaaccgactgaacggccggtttttttgcgcagtacaatcccaatgatatctaagccaccagtggaaatatcgtttttcaaggccatcccggtcccaaaaccgttaattaccgccccaaaaatcgcacagataatcggattagccgttagctgtgtaaagggcataatctgtaccataacacttgaaaaaacaactgcaataaacgtataaatggtgaaatggtggccaattttgaaccacgcaagaataaataatggcacatttaacacgaataacatcaatgacgttgataatggaaatggtagaaacggcataaatttcgacgtcactgtatgaatgaattgcgcgaacccggtaaccccagaggcgtaaatgccaccttcttcccagaaaaagttcaatgcaatcgacacacaaattccgtataaaatggctgccgaaatcttcgccatattttgatgtttccgagctaaatcgtccacttgaatatcacacctattcacttttgatgtctttcattctagcataccatttgtgaatactaaaggatttcttggaattaatgcacccaattttcacgaatgaaagcacggcgtgtcccctcgaccaattctgctctaaatggttcttttttatagaaatcttggtgatattcttcggctggatagaacggtttggcagcctcaatttgcgtgacaatcggttcgttgaagcgaccactatcgattaatgcttgtttggaagcttccgcgattgcacgttgctcaggcgagttaacgaaaatcaccggccggtaactatcgccacgatcttggaactgccccatggcatcggttggatctgtttggcgccaataaatttcaactaattccgcataagaaataatcgcgggatcaaatgtaatttcaactgcttcagtgtgccccgtcgtatgcgagcaaacttcctcataagttggattaggaacatgcccaccggtataaccagaaacaaccttgataatccccggttgctgatcaaacggatgaaccatgcaccaaaaacacccaccggcaaaaattgctgtatcagttgccattattgtgccccctcttcaaataagcttagatattgaccgtaaccttcattttcgagttgctcgactggaataaattttaaagctgctgagttgatgcaatagcgtaatccaccagcttcttgcggtccatcattaaaaacgtgccctaaatgcgaattagcttcttcactacggacttcaacgcgttccatcccataagattggtcccggcgttccgtcaaaggcgcaattggctttgtaaatgagggccaaccacagcctgcatcatatttatctaacgaactaaataatggttcatgactgacaacatccacgtagatgccttgttcatcaaaatcatcatactcgccggtaaatggggcctccgtcgcattttgttgggttaccgcatattgttccgtcgttaaccgttgttctaaatcatctgtcatatccatcactccttcgtgtttattattataagcagatacaaacagatagcgacaaatatgctcagagtgttctgacagtctgggatttcctgaggattaaagtgaattgactgccatcaaataaaaaagatgcctcaaatttacttttgaggcatcttatatgcgttaattttgatttaactgttgttgcactgctttaaagtcagcatagacttcagcaagtggtaccgtaatttcaacaccactaatcatgtctttaacatgtgctgtttgatcagctaattctgattcaccgattgtaatcaccatttgggcgtttaacttattagctgttttaaattgcgcttttggtttacgatcaagatagtctcgatcagcggttaaacctgtatcacgaatcttttcaacgatttggagagttgtcgcacttgtttcagcgccaattccaacgacatacacatcgagtttagattctggaaccaacgcttcgttttgcgcattcatcaataataataatcgttcaacgcctaagccaaaaccaacccctggcatgtccgggccaccaagttgttcaactaacccattataacggccaccggctaagacggttgtgtagccgcgaccaagcaccttattatttgtcataatttcaaaaattgtgtgattgtaataatcgagtccgcgcaccatttcagtatccacttcatatggaatgtgcaatgtttcaagtaagtgcttaaccgtttcaaagtgcgccgttgcttctggtgttaagtaatccaaaataacaggtgcatccttcacaatttcttggtccttagcatctttactatctaagacgcgcaatgggttcttgtgtagacgaactttagaatcgtcacttaattcatcaaaatgtggttcaagatagctgacaagggcttcatgataagccgcgcgactttccgcatcccctaaggtattgatggccagttttaaatccgtaatatggcattcacgtaataaacgcatcgccatgctaatgacttcaatatcgaccgctggattctcagaaccaaatgcttcgaccccaatttgatggaactggcgttgccggcctgattgtggccgttcataacggaacattggtcccatgtaatacaccttataaggtttttgatgttctggcccataaagtttattttctacgaacgcccgtacaactccagctgtgccctctggacgcagcgcgatatgccgatcccctttatccatgaaatcatacatttctttgctgacaatatcagatgtatcgcctgaactccgtgaaaagacatcatagctttcaaataatggtgttctaatttcgttgaattgatagcgggcaaaaacgtcgcgtgccgttttctccactaattgccactggtttgaatctccaggtaaaatatccgcagttccttttggcttttgatagcccatgatcattcctccaaatggataccaaataaaaaaacacccctgtcgttgaacaagggtgcttaaatgcacggtaccaccttaattttagcttaattatataacgttgttgccaacggtgtgcgaccacacagacctcaaaagcagtctcggcgtgccattgatttcttgcagctgtgaaatcatctctgtcgtagggggcttagcctttactttatcactggtcatcacttattcttattgttataagattaacgttatttcaaaaaaaagtcaatcaatcttgaattttttgtaactttttcgctgaaactctttagaaagttgagttttttgctataattaaccttataaattaataaaacataacaaaggtgttgaaaaaaatgcagaaacctttgagctggtttaaacactatccggccgttattatattagcattactcgtttttgtcggtctctttgtgacccacgcgctggctgcttaccaacaaattacgattaaagcgaacgtcgtaaacgttcgccaaggccctggattatcttatgatgtcatgagtcaagccaataaaggcgaaacaatgaatgttatctcacaaaagaataattggtaccaagtgcgcttaagtggtgataagattggctgggttgctagctggttagtcgataacaccgaagtcagtgccacttcaaaccgagtcgctaaggtcaccaacagttttgccaatgtccgccaaagcagtagtgccgatagtcaactactcggtaagttaaatcaaggtgacgaaattacagtcttataccaacaaaacggttggagccagattaaatacaactcagcagttggttgggtacaaagtgatttaatcgaagtttccgaccaagctccggcgactgttcaaaaaacgacaaccgctgaatctgagtctacggatactgatacaagtagctccgcgattaaatcagtgaccacccaactggataataccaagctacgcactggtcctgatgtttcgtatcaatatacccaaagctacccagccaataccaagctaacttatatcaataagagtggtacttggtatcaagttaaagatgccgatggtaataccggttacgtcgcaagttgggttgtcactccttctgagaagaatgaagttgttaagactagcgctacttccctttctgaagccaccattgttttagatgctggtcatggtggcaccgacgtcggtgcactttcaactaagtctaagtatgaaaaagactacacattagcgaccgtcgatgcgattgctaaaaaattaaaagcggctggtgctaacgtcgtgctaacgcgttcaaatgatagttttgtcgatctcgaaccgcgacctgctcttgccaataaattaaaggctgatgcctttatcagcgttcattttgattcaagcaatgaagccaatgaagcatccgggacaacaacctactactattcaagcagtaaggatatgagcctcgcgaaggccatcaacaatcagactaagacattaccgcttaacaatcgcggcattgaatacggcaattatcaagtccttcgcgataatcaacggcctgctgttctcttagaactcggctacatcaattctgataaagactttagttatattagcagtgctaattaccaagctaaagtcgctgatgccgtttataccggcttaaccgactatttcaaataactaaaaaagaaccgtcagattaaatctgacggttcttttttacataattggggcaaacaaacgcgccaagtcctgtgaccaacgttcttgattgctttgctcttgtatccgttgtttcgtaaatggtaagcattcttttaaatcagccgtaaaagattgttcaagttcagttgcgagttgtgcatcatataaaaaagcggtcgtttcaaaattcaatctaaaactgcgaatatctaaattagccgtcccaaccgctgctagttgcccatcaactaacattacgcgtgatttaaatccggttgattcagagaagtaaatctgaccgcccgccttcacgatttgtctagcgtaatacaaactcgcatgatgaatcattttatgttttgcacgtttggccatcatgatcttcacagtcaccccagaattaatggctaacactaacgccgccaatacagaatcatccggaataaaatatggggtctgaatccacagccgttttttagcggcagcaatcatcttcaaaaagcctaacttaatctcatcgagttctcgatcaggtccacttgataccagttgcatgctagtctgcccgtgttcatctgagttaggaaaatattgcggactgtaatacaccttttcctgacgcgtagccgcattccagtccatgaaaaagcgagcttgaaacgataacacaccatcgccggtaatccgaatccgcgtatctcgtgcaggaatattaacgtgatgattattctggttaaaatcgccaaggtaggcggtattgccatcaattactgccaattgccggtggttacgaaagttaaagcgtagattaacgaaccggaaccgagaactaaaaaacgggacaacttggccgccggctgcttccaatggcttaaagaactgccgggataaatgttgcgacccaaatgcatcatacatcacacgcacttttaccccccgcagtgccttgtaagccaatagattgaccagttgacgcccgtgttcgttgtcataaaaagcatagtattcaagatggatatgatcttgcgcccgattgacatccgttaacaactgttgatacgccgccttcaaatccgttaaaattgttacattgttttcctgggtcacaaccgcggtatttgatactaagaagaggttgattaagctctgcgtttctggcggtaacgtgtgttgcttctgcgcttggcgtaacgctgctttttgggaggtcaccaaggcatcaatgccgagccgttcttgtgttttcaaatcgaccatatgatcttccggtaatttttttccgaaaaatagatacaaaacaaagccgataattggtaagaaaatcaataccaagagccaggcccaggttgctgcaatatcacgttgttggcgaaatacggtgataacagccccgattgtatttgcaatccaaatcagtgctatcccccagataatgattgctgtcattcttcattcatcctattctttaaaccactttgcttttaatttggctagcgtaccatttgcttgtaagacccgataacgtcggttgataaattgacgtaattgttgatcttgcggacgcatcccaacagcaaactgttctgctgcaaaaggactgtcgatggcttgaaaatcgctgccgttgtggcgtgacttaatttcaaattgcgcgtagacttcatcaattaagagccccttaatccgatcggcctgtaagtcgataaacgcattgttataagtatcatataggattggtgcatggttggcaattctttgctgtaatcgtttaggataacgctctagttgttccatcccagatgagcccgtttgaacgcctaatggttggttggttaaatcagccatttgattaacagggtgtttcttgagcgacacaatcatttgccgattagtcagatacgggtcactaaacgcaacccgttttgcccgttgcgccgttttagaataaccactccaaattaaatcaatcgtttgattattcaattccgtttctttcatatcccaatcaatcgactgaaagtcaacccgaatgccactccccttaaaaatcgcccgtgccaaatcaacatcaaaaccggttaattgaccattcttctcacggtaagtcattggcacaaaactatcatcaatcccgacgactattttttggcgtttttgaatcgttgcccattgatcagcctgctgattgcgttgtgcgcaccctgctaaaccaatcatgctcatcaataaagccgctattaatgctgtttttttaagcttcatcattttgttgaaccccgtttggttgtaattcaaagatttgatcagcaatctggttggcaaattgaatatcatgggtgacaacaatttgtgtcattccctgctgtttcaaatctaaaatgagttgtgcgacacttgccactaacgatggatcaagtgcgctggttggttcgtcataacagagaatctccggttgcatcgccaatgcgcgggcaattgcgactcgttgacgttgaccgcctgatagttggaacggataagccgtcgcctgagcacttaaccctagttgctgtaataattttgcgccatctgctttagcctttttagcgggttgttttttgaccatgatgggtgccagcgtcacattctcaaggacagaaagatgtgggaataaccgaaaatcttggaagacaacgccaatgcgcgccccttgttcccgattactaggttcgtaaggtttaccatcaataataaaccgtccgctatcgggttgatcaagcccactcattaaccgtaataaagttgatttgccagcaccacttggaccgacaatcgctaaaatactccctgattcaactgataaatttaagtcgttcaaaatttgccgacctttgaaggattgattgatattttctaattgaaacatgttgccgcctccttagcgataataacgataatagcgttccaaacgccgtaatgcccatgtacaaatggctgttaacaataaataaataatcccgactagcaaaagtggtaagagattgacatcacgcgcacttgcgacattgccagcccgcagtaaatccccaatgccgataacatacactaacgatgaatctttaatcaagttgatcacttcgttaccgacagacggtaagacaattttaaccgtttggggcacgataattttagcgattgtttgtgggtaagttaagcctaagacctcagctgcttcgatctgaccattatcaacggcttgaaagccgccccggaaaatttcggcaaaatacgcagcataattcaaaataaaagcgattaaagcagcatcgaaccggttaaaaacaattccgaccacgggtaaaccataaaatacaaaaattagttgtaataataacggtgtcccacgcatcagccacacatataaatctaaaagataatgcagtggtttaaacttagctaataaccctaaacttaataataaaccaagtggaatcgcgccaataatcgttaggccaaaaacagccaacgtcatctgcgccccacttaataatgctggtaaaatcgataaactatagtcaatcatgacagactcctctcatttgtccaaaataaaaagccctctttgcgtttaaaacacaaagagggctaaatttcgcggtgccacctcaaatttttgtttgcctcacaacaaacaactcagttagttttagaccaataaaaaaagtcccctggatttctccaagaggacgaatttatcgcggtgccacctcagtttaataaactgctcacgcagcttaaacttatgtagtttctaaaactacagcgataacgggctaacggatcatctttattcgatgatcaaactcacggttgtgccattaatctcaagggccgacttccaccacgcatcagctctctgaacctcaagaattaatttggaccgttcaacgtttaatgtattgttattcattctattcaatatcgcatcaaaagtcaatggttaatgtttattgcttaccgaaaagacgggcccagaaaccaaccttgtgttgtttcaaagtcatcaatggaactgtttcgcctagtaaacgacgggcaatattccgatagccttggcttgctgggtttttcggatccatcacaattggttcgccggcattggacgtcttgataaccgcatcatcatcaaaaataatgcctaacaatgaaattgaaagatgtttggtaatttcatcaacatccatcgtttcgccttcattcatcatatgacgccgaatccggttaattactaagcgtggcgcaatccgcatttcttcttcttctagcaagccgacaacgcggtcagcatcactaacagaagaaatttcgggagttgcaaccacaattgcaccgtctgcaccggcaatcgcatttttaaagccagattcaatcccagcaggacaatcaagaatcacaaaatcgaattcttcttttaattcattcacgatggcggtgacttcatcaggcgttaacgcttctttatccgcattttgagcggctggcaataagtaaattttttcatcaaaacgtttatctttaatcagtgcttggtgcaacttagcacggccttgggcgacatccacgatatcataaataatgcggttgctcaatcctaagacaacatctaaattacgcagaccaatgtctaaatctaacaagcaaaccttcttatctaaaagcgcaagcgccgtcccaatattggcgcttgatgttgttttaccaacgccgcctttaccggatgtaataaccaaagctgttcccatttttattgctccttcattttacgatataattttggattaatctgtttcaaatccgttaactcaccgtagtcgataacatgtaaatcattgatgaaacttacactctgtgccgtaaatggcgtcttctggtgatcgagaatctcaactgcgtctgctatccgcaattgtaacgcgtgtgataaatcacctgcaacaactgcttctgcattatctggaaacccagcgtgcacaatcccggcaacttcaccaagtacgaagatactgcccgttgcttttaacattgcgccttggtgtaaattaccgacgaataagacatcgccaacataattgacctcttggccgcttcgtaaaacattgggttcaacgtgaatactattttcccgccgatcaatctcagcctgttcaatcgtcatgacttccgattgaatgcttgtcccattaaattctggaaactgctcaaagacggtcgccagtgcttgcttttgcgcatcattcaacaagcgtctaccagtggtcagctccagttcaatctgatcgctccccaactgcggttgctctaagcgaatcttattcaataattccgctagtgcaactaatgcttgatcgaaatccgcacccgcatcaatgtttaattcaaaaccttctttgcgtcctcgcaacgtgactgcatccatagaaaaatcaaaccccttaccgttctgattttaattttagcaataaatattttaaaggcaaatacaaaaagacaaaataaaccaaatttaatgcaattgtcggtgctaaaacattactaataaattcgactggtgttactgttgcataaccaatcaagcgattcatgatgtaaatcgtactctcgagtaatgttaaacacaagacatcgattagcccaatgaaaaaggctgagtcaggtaaatattgttttaaataacgcactgtatagataatgagcggcactgcaaaagtgtacatcccgatcatccccgtataatacaaatcgtataaaagaccaatccctgctgcataccacgtaagttggcgttcctctggtaaaacaaaggccgttaccactaacacgagcataaatagccggctaatcaacgtatgatctggtgtatataaccattgttcacataaatgactgatggcgccatccaaataaaacgcaacgagtaagtagattggtaataaatagcgccgttgtaatcgcgtcacacccatgctactcaccttcaatcgttcgtttgatgacagtcacaacggttaaattgtttaaatcagcagctggggtcacataaacagttaatgctaacccaaaatcgtctttcttaactgctgctaccttaccaaggtacaagcctttaggggttaatccacctaaaccagacgtgatcactttgtcacctttttcgattgccgcatcggtcttaatctgcccgagcttcaattgtttccggtcagcattgtaaccggacatgatcccattaacttgcttaccatctttggtattcaccacagcagcaaatccgttactactttgatccgtacttgaaacgagttcaaccttcgaattagtcttgttgacttcaacaatccgtccaataatcccagactcagacatgacgggcatatcttttttaagtccagctaaggcccctttattgataaccaatgcattttgccaattatcaggattccgggataaaacagacgcattaacggttgtataatccgtcaaggtgccttttaagccgagttcctttttcaaacttgcattttcttctttgagggtttgggtttgaaccttggtttgagctaaatcatcaagttgtgctttaagttctttgttttcctggtacgtattaatcaagtctgttaaggcatctacccctcgaccaatcccattggccggcacgctaatgacttggttagtgatgcccgttacgtcgttgccaaattggcgtacgaaactcggactctttttgttattgcgtaaaccaactgacattgcgatgaagcccatgcagacgattagcatgattaataacacaattaacttcttatttgaaaaaaacttttgcatggtttcttcgccaccatccatccttaatatcgtaaaggtgggacaaaaaccggtgatcagtagtccttcctatagcaatcgattcacaacccgaatctgtcactaatttaggcgctacgtcaacgctgaccgcttcttgtcccacttctactgaacgattaatttttcttcataacatcgatattctttaatgattcgccagttccgactgcaacacagtctaaaggatcttgagcgataaagactggcactttagtagcatctgaaatcacttctggtaagtgtttcaacaatgcgccgccaccagttaagacaatcccgtgatcaatcacgtcggctgcaatttctggtgatgtttcttcaagtgtttctttgatggcttcgataatggctgtgacaacttctttgatggcttcagcaatatcaacagcttgaatgtccactgtcttaggtagcccagttactaaatcgcgaccacgaatgctcatcgcttcaatttccttagcgcgttctggtgatgctgaagcgatttggaatttgatttgttcggctgttctttcaccaatcaacaagttattgttttgacggatgtaagaaatgatcgcgtcatctaacttgtcgccagccattcgaattgaacggcttgaaacaatcccacctaatgagattgtggcaacgtctgttgtcccgccaccgatatcaacgaccatgctaccagttggatccatcacaggaagaccggcaccaattgcagctgcaaatggttcttcaatgacgtatgcatcacgagcgcctgccaccttagttgcatcgattacagcacgtttttcaacttcagtcacaccacttggtacgcagaccattacaaatggcttgctagatgagcgacctaatgatttttcgataaaatatttaagcatggcagcagttgtatcgtaatctgcgatcacgccatctttcattgggcgaattgccacaatactaccaggtgtccggccgatcatgtcgcgggcttctgagccaacagcaatcacgtcaccagtttgtgtatttttagcgacaacagagggttctctcaagacaatgtctttaccgtccatgtatacgagtgtgtttgcggtacctaagtcaataccgatatttctagtccctaatccgaacactatttttctctccttcagttaccaaacgtttttatagtcattggcattatatcataattttacgtaataaaaaacgcaatgtaactactatgttaacggattttcagaaaatttgacaggtctcgcctaaaattaacagattcttaaagaaaaaagcgttctcttttactccactaagtaaccctcttctcgcaaactgagatactgctggcttccaataatcaagtggtctaggcatacaatgcccatcagttcaccacaggcgacaattcgtttagtgaaggcaatatcttgcgttgacggcgtcaactggccgcttggatgattatgcaccaaaataaattttgctgcagaataacggaccgctaatttaaagacttcccgcggatgcgcaactgaactatcgagtgtgccaatataaatctgtttcatctgaataatttgatttttaacgtctaaaaaaacagctagcagttgttcttgcgtttcgcccgctagtgtttcaatcatgcgacggccaaccatttggctcgatgcgaccacaccaaaccggagagttcgttgcgtttgcaatcggtgactcaattcacagatggcttggatttcaatcgctttgactggtccaattcctgccagtgtttccaactgcgttaaacttgcttgttctaaatcccgaaagtcaggataatgcgctagcaatttgcgcgccacctcaccaacagataggtgactattaccagaacgcaaaatgacgattgccaattgctcgttcgataaacttgctgcgccgtactgcattaattgttctcttggttgtaattgtcctgtattccccgccattgtttgcctcccacaaaaaaagacgcatgacgcgtcttcttggtttaactaacaatacgttaattaacgggcttatttttctaaatacggaatcacttgagccaaatccccaacggtcgcaagtgtttgctgattggttatcgcagttggtgcaattaaatcagggaccataatcaccggaatggcagctttactagcggccatcacaccattaggtgagtcttctaatactagggcactaggcgctggtaaggctaatctatccaacgcttttaaaaagatttcggggttcggtttgccgtgagtcacttcgtctcccgcaacaatttgactaaaccgtgattgtaggccagtactttgcataaagtcatcgaccatgctgcggaaattgctcgatgcaatcacccgactaatcccctgattatcacagtaatctagtaaatcgactaaccctggcttaattgcaacaccatctgcttcaacaaccgttgctacgttatggtatgaacgatcaataaattctgttgcggccgttgccgaaccaagctttgctttaaaataattgcgtaaatacgtatcagtggtccctaagatggcatggtgatcttcaggtgtaaaatcaaagcccatttctttagcggcccgaatattggcttggtaataaatcttctccgaatcaaccaatagaccgtccatatcaaaaataattcctctagttgtcattgactattctcctttaaaatattggcgaatcgtactaattaaatatagcgaacccgttacgagtaatacatcatcagccgacacatccgctaataattcggttaatgcaaccggccagtccggttcaaatgtaatcgtctcatcaactgctgcatattgggccgctgttgccgcgcgtggattatcaggaaccgtagtcagcaccatccgcgtcgctatttttttgagctgtggtaacatctcatccagatttttatcaccaagcgctccgaataacaggtaaatgtcacgatttttaaattgatgccgcgttgtctgaaccaattgcgccaccccttccggattatgtgcaccatccaagataattaacggctcatcgttgattttttcgaagcgcccaggccagttaacccgttttaaagcacgcttgatgtctcgaacctctagtttttgttgcgtcaactgtaagtaacaccaaaatacttgtaatgcaaccgcggcgttttcaatttgataatcccccatcagcggaatctgtaattgtcgatacgttaccgcgtcattttggaaagttaactgttgcccccaagtaggtaacgttttgaccgcagcactcgaaaaatcacagccactaatggctaacgaactattcaaacgagttgccgtttcctcaaccaccgtcagtgcttcttttggtaattgaccaatcacgactggatgaccagccttaatgatcccggctttttgagtcgcaatttctgcaaatgtcttgcctaatagagcctgatgatcaagaccaatcgacgtaataactgatatcagcggcgtcaacacattagtcgagtcatacaaaccgccaattccgacttccacaacggcgacatcaacctgctgttgtttgaaatatagaaacatcattgctgtgatccattcaaactcggtcacttcaaattcggggtcagttgtttgaatctgggcaaccgttgtctgaatttgttgcgtaacagttactaaatcggcatcactgattggttcctgattgataacaattcgctcgttgaaccgcataataaacggcgatgtgtaacgaccgacttttaaacctaactcttcaatcaaacaactgaccattttgacaacggatcccttgccattagtgccagtcacatgaatgaattgttggttttcttgcggattaccgagacctgccaacaattgcgtcattcggttcaggttcgcttctttatgtaatctggggcgcgaatgaatatacgccaaagctgtttcgtaatctgtcactaacatcgccaatctcctttaacaaactgtctctattttagcatagattgcacgcgaatcgatgcttaaaaactggcgcacacaaaaagaccacctcagtttttaaggtggccttaacgtgcttttggttgcaacaacttccgcttaatctaaaaattccgttaatcctaaaacctgaattaacggaatttttgtattgatgctcagttgctacccgcaaccaatcacacttctttcactaacgtgctcctcgagcagccttttccggttaactgcaaaatgggcatcatggcaaaaaacgccacaatgcccattttactgttaatcctcaaagcctaaccagctcgagtcgcacttcttttttaacgtgttttcatcaacagcttcttgtgctttgctacacttatcaaatcggcgcttacagcgccaattcgctaagttaggcaaatgctcagaagctaaccgttgatgatgcacttatgcattttttaattctgctactcgtttttcgactgattggtattgttgttcgtagtctgcttgtttgtcgcgttcttcttggaccactttttctggtgcgcggtctgtgaagcccttgtttgacaacttgcctttagcacgtttgatttcaccgtctaaacgtttcaattcgccttctaaacgggcgatttcttcgtctaagtcgagcaattcagccaatggcacataaacttctgcaccactgataatggctgtcttcgccaatgctggtgctgttaaaccttcagcaatttcaagtgacttaggatgtacgaagcgttcgatgaagtcttggttttgtttgaagatcgtcattaatggcgcatcttgaatgttgaccaagacatcaattggcttgcttagtggtgcattggcttcggaacggatattccggacacttctaattagatcgattaacgcattcatttgcgttgttgcttctggatcgtctaattcagcgtgcacttctggataagccgcattgacgattgaatcgccagtatgtggcatactttgccagatttcttccgtgacaaatggcatcactgggtgtaatagacgcaatgtttggtctaaaacataagccaagttataacgtttattggcaatggctgcttggtcgtctccgtaaaggacttccttcgccatttcaatataccagtcacagaaatcgttccagataaagttatacaatgtccggcctgcttcaccaaattcgaagctttcataaagccgtgtaacatctgccaccgtttggttcaattggcttaagatccatttgtccgttaaatcaaggttagcggcatctggcatcttcgttggcgctggtgtgtcttcaaggttcatgatgacgaaacgacttgcgttccaaatcttattgatgaagttccaggcagcatccatcttcgtgtaactgaaacgaacatcttggcctggtgttgagccactcgttaagaaccaacgcaatgcatcggcaccgtatttttcaatgacttccattgggtcaatcccattaccaagtgatttactcatcttacggccttgttcatcgcggattaaaccgtgaatgaggacgtgttcgaatgggcgttgttctgtaaattcgagactttggaaaatcatccgtgagacccagaagaagatgatatcgtagccagttaccaacgtattggttgggaagtagcgtttgaagtcaggcgcttcagtgtttggccaacccattgttgaaaatggccataaggcactactgaaccatgtgtctaggacatcagaatcttgagtccagttttcgatatcttttggtgcttcttcgccgacatacatttcaccagtttgtttatggtaccaagctgggatttggtgcccccaccataattgacgcgaaataacccaatcatgaacgttttccatccattgtgtgaaggtattttcgaatcgttctggcacaaagttcaccttttgatcggttgcttggttcttcaaagccatttcagcaagtggcttcatcttaacaaaccattgcgttgaaagccgggcttcaacttgtacaccggtccgttcagaatgaccaacactatgtgtcattgggtcgactttaatcaaataaccttgttccttcaagtcagcaacaatcgctttacgtgcttcaaaacgatccatgccgttatacttgccggcactttcattcatgctggcatcttcgttcatgacattgatccgtggtaagtcatgccgattaccgacttcaaaatcgttagggtcgtgtgctggtgtaatcttcaaagcaccagtaccgaaatccttatcgacatagtgatcagcgataatcggaatttcacgattcattaatggtaatgtgaccgtcttgccaacaaggtccgcataccgttcatcatctggatgtacagcgatagcagtatcaccaggtaatgtttcaggacgtgttgtggcaatttcgatgctcccagaaccatcggtcaatggatagttaacatgatagaaggccccttcatcatcttgatgcaacacttcgatatctgataaagccgtccgtgcttttggatcccaattgatgatgtattcgccacgatagattaagcccttgttgtataaggtaacaaagactttacgaacagcgtctgataagccatcgtctaatgtgaaccgttcacgtgaataatcaagtgataagcccatcttagcccattgtgcgtggatggttgcggcatattcatctttccagtcccagacttgttcgatgaatttttcacgacctaagtcataacgtgaaatcccttgttcagctaattttgcttccactttagcttgagttgcaatcccggcatgatccatccctggcaaccagagtacatcatacccttgcatccgtttttgccggattaacatatcttgtaaggtcgtatcccaggcatggcctaaatggagtttacccgtaacatttggcggtggaataacgattgaataaggtttggcatctggattggcatttggcttgaataaatcagcgtctaaccaatcttgataacgaccggcttcaacttgatttggatcatatttggttgacatttctttgtgatcagtcatcttgttcactcctttaaaatattgcgtttaatggcaaacaaaaaagcattcctcacaataggacgaatgctttttcgcggtaccacctaaattaggactagactagtccccaactcatgatttgttaacgaacgaaattgtccggttagccctacttaatttcaggttaacagctcacaagctaccgattaattggtcattggaagacgtctcagccatgcatcttctctctaaactagcccaatcttaatcgctcttgttcaacgcgttgttaatagtttagctgagtgaacgccaaaggtcaagcgtcaccggcgttcattctgaaaataaatcccgaatcttctccccaaaaaaatcctgagaacaacatactgttattctcaggatttttatagttttaattatttaagatgggggagttcagctaataataattcgctagcgactaatccgagtaggctgacaataacgtatacccagtgagaaccactaccccagctgaatagataagcatcaacaccaactaaaatgataaagagcacgcaatttgtgattaagccaattttgaaagtcaattgactagcaataacggcgaataaaacgattgaaatgaaaataatgaagaatgcagaaatcaaagtgacgaccacctaacgctatccgatttgaaatactacgctcattttactataaccgcagacgaacaacaattaaatttgtgggagataaagtttactttttgggtgttcgttaacagaatcttcaaatttacagtgtacactaggggatattcaactgatcaagggccgttatcaagccgattaatggacagacttttcactgagcggctatactattgacaggtgaatttaattaaaagattgggggaactatcagatggttcgtgagacagatttacgagcacaagatccacgtgttcaacgaacaaagcaacaattacgtcaagccctcattatcttgctgaaagacagtacaccaaaggggatttcgattcaagcaatcaccaagcaagcggcaattactcgcgggaccttttatctccattatgaagataaagtggatttcatccgaaccgcggtggccgatttggtggccgatttttatcagcaagtgactgtagtggtcgatcagacatatcgtcaggtcagtttacaggcactttttgaatatgttgaacaacaacaagctgcttttaaagtgttctataaaaatgaggcgacgcttcactttcaggcacaactgactgaatcaatgcgccaattaatgcaggattacgtggctaaacgctataatcagacttcacaggctgatcaaattgagatgagtattacgattgattatttagcggtggccagtttagcgttggtctttaagtgggtcaatgacgggcttgtgtattcaccacgctacatggctaagatgttataccaattggtacaaacacctaatacgacgtttgatgtcgcacaattttttgtcgaggcgtaataaagcattgactcgccctgtgatattcgatataatatgaacgttgtaattgtgagctccacagctgcaaccgcgcatactaaggcattaagtactatgattagtcaccttagttggcgagtctaagaaaaaataggaggtgcacacatgtacgcaattatcaaaacaggtggcaaacaatataaggtagaagctggtcaagcaatctacgttgaaaagttagccgcagaagctggcgaaaaagtaacttttgatcaagttattttagttggtggtgaaacaactaaggttggtacaccaaacattgatggtgttactgttgatggtactgttgaaaaacaagggcgcgaaaagaaagttgttactttcaaatacaaacctaagaaacacagtcatcaaaagaagggtcatcgtcaaccatatactaaagtgatgatcgacgctatcaacgcctaattgagggaaataagatgattcaagctgactttacggtcaatgccgattcgcaaattatttcttttcaaattacgggtcatgccgactcgggtccttacgggagtgatatcgtctgtgcagctgtttctgctgtctcaatcgggacaatcaacagtttgcaaaagcttgctggttttgaaccagaggtagaagcagataacctgaatggtggtttgttaacttgtcagattccggcaacggtttcgggccaagctttagcgacagctcagattctcttgcagaatttgcagttgacgcttgaagatattacgcaacaatacgggcagtacattcaagtacaaacaaaacgtaaatagacagttaataaacaggaggtgcatttagatgttacaaatgaatttacaattcttctctcaccataagggtggcggttcaacaactaacggccgtaactctgcaggtcgtcgtttaggttctaaacgtgctgatggccaaactgtaacagctggttcaattctttaccgtcaacgcggtacaaagattcatccaggtgaaaatgttggtcgcggtggcgatgacacattatttgctcttatcgaaggtgtcgttcgtttcgaacgcctcggtaaaaacaagaaaaaggtttctgtatacgctgcagaagctaaataatttttctcacacccactttatgtgggtgttttttttgtgcgagagaagcggggctgtcgtcacattctaaacgtgttccatcagtcatatctctccggttaaccctgagtcacaaatgattgttccacaatcttttgcaactctgtgttaatcctctagatatcccagactgatgtcacactctgtttgtgtaaatccagttttactggtatactaattactcaggcaacaaaccattgacaatctaaaagtgagtgttcagatcgacttttgctcgattgaatacgctaaaagggattggcgggtgccggtccctttttttatagctacttttagggataaaaggctagaaatacttgcttttgagcctgatttcttgctatgattaggacaatggcatacttatataatgctcggaggataaacaatgttatcagtaaatgattttaaaaatggcttgaccattgaatttgacaacaacctatggcggattgttgaattccaacatgttaaaccaggtaagggtggcgcttttgtccgctcaaaacttaagaatttaagaacgggtgccaatcaagaaaagacattccgttcaactgaaaaagttgaaaaagcaatcattgatacaaaatcaatgcaatatctttatgcagatggtgacaaccacgtcttcatggatactgaaacttacgaacaattagaattaccagcagcacaaatcaatgatgaattgaaatacttgaaagaaaatatgcaagtttctatcatgatgtatggtagtgaaaccttaggggttgaattaccaaacacggttgatttagcagtggctgcaacagaacctggtgttcgtggtgatacatcttcgggtggtactaaaccagcaacacttgaaactggcttagtggtccaagtaccgtttttcgttaacgaaggtgatttgttaacgattaacacatctgatgggagttacatctcacgggcataggctaaattagcaagaacttgttaggaggggtttcgatggcagaagaaacaaatattgtacttgatacacaagaaaatgcattgggcaagattcaaatggcacctgaagttgtggaagtgattttagggattgcagcaagcaagattgatggggtccaccaaatgcgggggacgttatcatcatccattaacgaattgtttggtcgttcgaatcacggtaaaggggtaactcttaaggtgattgatggcaaagtgaatgcggatgtttatgtttatctgaactatggtgtttctgtgccgaaggttgcccttgcgatgcaagaagcccttaaagaacaattattgttcatgactgatttagaactagcagaagtcaacgtacacgtggtgggcgttgtcactgaaaaagcaccaaaaattattgatccagatgacttatttaacgatgaaacacctgatcaaaatggagaccaatcttaatgcctaattttaaccgacaccaaattcgccaagctgcatttcaagtgttgtttgcgttaaatgctaatgacacattagaattggcagatgcttaccaagccgttttaaccatggatcaattcgatgctgaagaagttgaagaagttgctgttccagactaccttgccttcttggtaacgggcgtcacagaacatcaagcagaattagacgccgctttaacgccatacttgaagaagggctggcaactatcacggttagccaaaccggatttaattatcttgcgtttagggttgtttgaaatgcaaaattcaacagaagcacccgataaagtggcgttgaatgaagcgctcgaacttgctaaacaatttacagatgatcaagcaaaaggttttatcaacggcgttttatctaaattcgttgaagcttaattagtaaaatacgaacgaaatcacttaaaacacgttaaaaagtatttttttagcgtgtttttttgaatttaaacggtcattatcagctgataacccggaattaaccgattaactatgctaaaatagaaacatcaaatatcgataaataggggttgttaactttggaattactagatggtcgagcacttgcaaatgaattaacacaagcacaacaaatggcggtggcaacactcaaacaacaaggggtaaccccgaaattagtggtcgtcatggtgggtgatgatccagcaagtgcgatttatacgcaaagcaagcaaaaaagagcgactaaaattggcatggcatctgagttaaaacgcctgtctgctgaaacaacggaagctgatttattagcggttgttcgccaactaaatacggatgaaaccgttgatggcattttagtccaattaccattaccaaaacaaattaatgaagaccatattatccgggcgattgacccacaaaaagacgttgatggttttagcccagtcaatattgggcgattatggcttaatcaaccgggcttagtggcctgtacgccaaatgggattatgcgcttattggcagctcacgatattgacgtggctggcaaaaatgtcgtgattgttggtcggagtaacatcgttggtcggccattggcagccttgatgctcaatgccaatgccacggtcacgattgcgcacagcagaacggcagacttaaaagccctaacgaaaacagccgacatcttagtggcggccatcggtaaaccacacttcttcggcattgaggatgtcaaagaaggggcggttgttgtcgatgtcggcattaatcggcttgaagatggaacagtcaccggtgatgtcgattttgaagcccttaaatcacatgttagtgcgatgacgccagttccgcgtggcgtggggccaatgacgattacgatgctcatggatcaaacgattgagattgcaaaggaacgtgctaaacgtggttaaaccaacagactatttaacagtcaccgcattaacgcagtatttaaaggctaaatttgaacgcgatccgtatttggatcgggtttatttaaccggcgaaatttcaaatttccgcttacgaccgaatgcgcatcaatattttagtttaaaagataataaagctaagatcagtgccattatgttcaagtccgcttttgaaaagattaagttcactcctgaagaggggatgaaagtgcttgttgtgggccggatttccttgtacgaagcaactggaaactatcagatctatgtggaacggatggagccagatggtcttggtgcattgtatcaagcctatgaacagctaaaagctaaattatcggctgaaggcttgtttgatgcaccaaagcaactattgccgcgctttccaaaacggattgcggtgattacgagtccttctggggctgttattcgcgatattataacaacgacgcaacgtcggtatccaattgcccaactcgtcttattcccagcggtggttcaaggtgacggtgcggctgatattttagtcgatcgactgaatcaagttaatcaacaaggggatttcgatacaattatcattggtcgtggtggtggttcgattgaagatttatggccgtttaatgaagaacgcgttgcgcgcgcgattgttgccagtcagattccggtgatttcatcagttggtcatgaaacggacacgactattgctgatttagtggcggatgttcgggcagcgacaccaacagcagcagctgaattagcaacaccggttttgacggacgaagtgttgaagttgcaacaacaacgtttgcggttatatcaggcattttcgaaaacattggcattaaacaaaaagcaattggtccacttacagaacagttacgtcttaaaacagccgcaacgcttgtatgacggctatttacaaaatgtcgatcagttgcaccgtcgtttattgttggcgcaacaacaacgcttacagactagtcaacagaatgtacaactcttgcagcaacgcctgcagtcgcaatcaccaagtggtgcgattcaacaagcacaaagaatgttgactgataccgatcatcgtttgaaacgagcaatcgagagccttgtccaaaatcggcggcaacaggctggacaagcggtggcagccttggatctcgtaagtccgttgaaaattttgggacgcggatttgcttatgtaacggatgataatcaaaatgtaatgaaaaaaacgaccgattttacggtcgaccaatcaatcgagttacatgtccaagatggcctcgtgaacgcgcgtgttacggccactcataaaggagacgaataagatggcagaaaagaaattaacatttgaagagaacttagcacaattggaagcaattgtgaatgaactggaaacgggcgatgtgccacttgaaaaagcgatgactgcttttcaaaagggtgttaaattaagtcaaacattagaagaaaccttaagtaaggctgaaaaaacgatggccaaagtgatggcagataatggcgaagaagtcccattggatgctgaggcacaagaataatggttgatttcaaaacgttcgcgcgccaacaagtgcccgcatttgaaacctatttgactgagcaacttgcccagattgaagaaccaaccttgcaaaaagcgatgacctattcagtgatggctggcgggaaacgtctccggccacttttggtatttgcggtgcttgcaagtgtggggcgaccgattaatcaaacggcgtatcgcgtagcgggggcattggaattaattcatagctactcattgattcatgatgatttaccggcgatggataatgatgacttacggcgcggtcaacctacgaaccataaggtttttggcgaggcgcaagctattctagccggcgacgggttattgacacttgcatttgaatggttaacgacgaccgatttgacgactgatcagcagagccgtactgttcgattattggcgcaagcagccggtccaagtggcatggttgctggtcagattgaagatatcgaaggacaaactaaaactttatcgttagctcaattgaaacaagtccatcagctcaaaacgggccgtttgattgaatgcgcggtcggcttaggggcgattttggctgatttatccgatgaacaaatggctagtttacagctttttgcgcaaaattatgggttggcatttcagatccaagatgatattttagacgtgacaagcactacagaagcgatgggcaaggcggtccataaggatgctgacgaacataagaatactttcccaggcttattgggcttagctggtgcaaaagacgcgttggatgagacttgtcaggccgcgcaaactgctttaacggatttatccgggttagataaagcactattaaatagttttttaaactattttaatgaataggagaacagatgaaaaaagaacgggtagacgtattattagtccaacagggattatttgattccagagaacaagcaaaacggtctgtgatggctggtgaagtgtacggtaaaaatgatgaacgaatcgacaaaccgggcgaaaaaatcgacgctgaaactgttttaagtgtcaaagggcgtaagattccgtatgttggccgaggggctttaaaattggcgaaagcggtcgaggttttcaacatcgatttacaggataaaatcgcacttgatatcggttcttcaacagggggctttactgatgtggcgcttagaaatggggccaaactctgttacgcactagatgtgggttataaccaactagcatggaaattgcgcgaagatccacgcgtcgtcgtgatggaacgggttaattttcgttacagtcaaccagaagatttcaccaatggtcaaccagattttgccatgacggatgtttcgtttatttcgttacataagattttggtgccgttgaaacccatcttgaaaccggactgcgaagcggttgctttaattaagccgcaattcgaagccggccctgaaaatgtcggtaaacacgggattgtgcgtgatccgaaagtgcataagatggtggttaaagacatcgttgattatagtttagcgacaggctacgacgtgctagggttagatttttcaccaattaaaggtggcgaaggcaatattgaattcttgattcatctacggaatacgacggctgagactggaacgatggcccaaaacgtgaatattgatacggttttagagaatgcctatgctgctttgaaacgaccaacgggaaaatagtgtataaaactttgtattttatgtataaatgcgctatcattgaggaatagaataatttctcacatgaagagggtgttttaatgcgcaaggtagatcggcaacgactgttaaaaaatttaatccagacccatgagattgaacgacaagaggattttgtgaagctgttacaagcggaagacatcgatgttacgcaagccacgatttcgcgggatattaaagaaatgcagctcattaaagtgccaaatgcggacgagggctatcactatagcctaccgcctgaaaagaaattagacgttaaagaaaagttgcgtcggattttacgtgacgcctatattacgcataaccaacaagactattttgtcgtgattaaagccttaccgggtaacgggacggcaattgctaatcttttggatcaaatgcagctcagtggtgtatttggtacaattggcggcgacgacaccgtgttggtgatttgtaaatcagaagaaaatgctaaacagtttacgaagtttattgaagacttgctaaagtaatttggcaagtttttttagcatcaagagaaacgaaagggggatgatcagatgttacaagagttggtcattcacgattttgcaattatcgatcagttagcaattagttttgaagaagggatgacggtgctctcgggggaaaccggagccggtaagtcaattattatcgatgcagtcgggttactcgttggtggccggggttcacaagactttatccggactggtgctaaaaaagcgacccttgaaggcttatttacgatgacgcctaatggcacaaccgccgcagtattagaccagtttggcattgaacacgacgaacaaaccgtcttattacagcgtgatttagccgttaatggacacaatgtttgtcgggtcaacggtcatttggtcaatacaaccactttgaagcatattggggaaaccttagttgatattcacggtcaaaatgaacaccaagaattaatgtatccagatcgccacttggggttgttggatgaatttgcgcaccaaaagttaacaaccgcgaaggcagcctatgccgaaacctatgctgcctatcgtaaagcacagcgtgccttgaagcaaaaacagcaaaatgaacaagaatgggcccaacgcttggatatgctgaaatttcaaactaacgaaattgatgcagcccaattacaggctgatgaagaaagcaagttagtcgaagaacgagccaaactaatgaactttcaaaaaattaaccaagcgttgcaagccagtcacacgattttagcaggagaagacgggaatgcgttagaccaaatcgcagttgcaatgaatcagatgcaagaaattgctgaactcgatccagaattcaagcgtattgcggacagtctgcagactggttattacacgttgcaagatagtagcattgatattagtcgggaagtttcaaacttagaatgggatgaagcacggttagatgaaatcgaacaacggctagaaactattaataatttggaacataagtatggtgattcaattgccgaaattctcgcttatggtgaaaaaatcggggctgaactagcagcgatgcaagcaactgaagcgaacgcaagtgagttggagcagcaattcacgcaacttgaacaacaacttaggacaaacggacaaacgttgacacaattacgccaaaaagcagctaagcaacttgaaaaagcggttcatcaacagttaaaagcgttatacatggaaaagacggtctttaaagttgaattcttgccaaatgaacaggaacagttcatggcctccgggatggacaaagttgaattttacattcaacccaaccctggtgaaaaactacggccgctcgctaaaattgcttctggtggggaattatcgcgcttgatgttagcccttaaaacgattttctccgaatcacaaggcgttactagcatcatctttgatgaagttgataccggagtgagtgggcgtgtggcccaagcaattgccaataagattagtgaaattggccaacattcgcaagtgctctgcattacgcatttgccgcaagtcgcagcaatgagtgatcatcagtatcaaattcaaaaacaggtaaaacaaaatcgaacggaaacgtccgttcaaaaagtaaccggtaaacaacggattgctgaactggcgcggatgttagcggggactgaagtaacagagttaactttagaacatgccgaagaattagtggcattagcggaaacggctaagcaaagtcgccgacattaaaataagggtgcagccaaaatatttttttggctgcacccttatttttttgcttaacttttcttttgaatgtaacgaatttgattgcaaaggacaatcttgtagaggttcgaacgacactcttttagcagatacttgttcgcactgagttgtttaaccaagcgcccggtcacttgttcgagatgatcgttaacattgaattgcaccgcaacatggtagtggcgttcaaacgcttgggtcataaataattgaatctgagcaggttgcatttggggttgttcaacaaaagcagtcgcttctggtgtaagttcaaaaaagcggtgatattgtttaaccaattgttgactgagtccgctaaccgttgcttgtttaaattccatgatttcatcctccgaacacttgtttgtgtttttattatacgaacaaatgttcagaattgcaagcggcattttttgatttttttcgtgtataataggatgagctgatagaaagggtgatttgatgggcaaaattgaatatgaaattatggcagaaatcggtgtgttgagtgaaaatccagccggttggcgtaaagaattgaatttaatctcttggaatcaacgtgcaccaaaatttgatttgcgagattgggcaccggatcatgccaaaatgggtaagggtgtgacgctgtcaaacgacgaaattgcgtccttaaggttaattttaaatgagatggaaacaaagtagacttgaaatttcccgccaaatagtgcaaaatagactttaactattttataaaagaagagggaattacgtagatgtccaatcgaggaatgttgatcgttttatcaggcccatcaggggtcggtaaaggaactgtccgtcaagcaatgctagaagatgaatttcgtgattttcactattcagtttcgatgacgacgagaaagccaagaccaggcgaacaagatggtgttgactattattttgtgagcaaagaagaattcgagcaagaaattgcaaatgatggtatgctagagtatgcacagtacgtggataattattatggcacaccgatgaagtatgtgaatcagacactagactcagggcgcgatgttttattagaaatcgaagtccaaggcgcaatgcaagtgcgcgagaagtgtcccgatggcgtcttcatcttcttgacaccacccgatttattagaattgcggaatcgaattcaaaaacgcggcacagacgatcaagccacgattgataagcggatgcaaaaagcagccgacgaaatcaagatgatggaaaattacgattatgctgtcgtcaacgacgaaattccaaatgcggttcaacgaatcgaaaagattatcgaaagtgaacacttacgagtgccacgtgtgatcgaccaatacaagaaaatgataggggaataataatatgattgtatatccttcaattgataagttactagaaaacgtgaactcacgttactcattggctgttttagctagcaagcgggcccatgaaatcgaagccggtgatattaagatgttatctgaatacaaatcacctaaaacggttgggatggcaatggaagaaattgctgctggcaatgtcattattgatcctgattcattgatgcttgaaaaagatgctgaaaaaatggataagctcgctcaaaaagacggcgaataagaataattaaagaacctgcatgtttagtttattcatcgatggatgtttaaattaaagtgcagtttttttagttttagggggttttgaaagtggatttaacgaataaacgaattgcagtttatgtgacaggtggcattgccgtctacaaagtggctaatttggtgcgcggattgattaaagcaggtgctgaggtccaagtggcaatgactcaggcggcaaccgaatttgtcacgccactgacgtttgccacattaacgcgtaaacccgtgttaactgatttgtttaatcaagaccaaccggatcgggttgcccatattcacttagcggattggactaatctggcggtgattactccggcgactgctaatctaatcgggaaactcgctaatgggattgctgacgactttgtctcgaccgccttgttagccactaccgcgcccaaattaattgtgccggcgatgaatgaacatatgtggtttaatccagctacccaacggaatttaacccaacttaaagcagatggctatactgtcatggaaccggataccggctttttagcggaaggctatgctggcgtcgggcggttccctgaagaaaccgcgattatggcagaagttgcgcaacaattcggaccgcaacggttaagcgggcagaacgtggtggtgactgccggtgggacacaagaaccaattgatccggtacgctacattggcaaccggtcttctggtaaaatggggtatgcagtggcccaagcagccgtgacgatgggggcgaatgtgatcctcatcagcacgcgtccagaattgccagtcccggctggtttgcacaaaataatttacgttgaaacggcggcgcaattacaaggcacagttagcagtgtctttgaaggggccgatgttgtggtgatggctgcggcggttgccgattttaaaccggcccaatatgtcacgcacaaaatcaaaaaacaaccgaacacaactgagatgcagttaactttagaccgtaccccagatattttggcgacgcttgggcagcagaagacgcatcaattcttggtcggattcgcggcagaaacagatgatttactacaaaatgcccaaaccaaactagcagctaaaaatgttgatttactcgtggcgaacgatgtcagtcagcatgatcggggctttggtgttgatcaaaatgcggttacgcttttacaaccgaatgcagcaccggaaacattagcgttggcggataaaagggtgattgcgactcaaattctagaacgagttgctgacttgttagattaactaaaaaggaggatttagatgccacaaatcgcaaaagtgattgtcgatgtgccgacgatgcaaactaatcggccatacgattaccaagtaccggatactttatcagacagtattcaacctgggatgcgtgtggcggttccttttggcaaaggtgatcgattaattcaaggctttattttgtccattcaagatcaagccaattttgaggggcaattaaagccgattacggcggtcattgatttacaaccggctgtgaattcagaattacttcaattatcaagttggttggcagagcggacctatgcctttcagattacgtgcttgcaaacgatgctcccaagtgtgatgcgtgctaagtattctaagaccgcgcaactagttgatgaaattgatccagccttacaagcaagcctgttcaatggtaacgacgaattaacgtttgaccagtcgctagatcccgaaaagttaaaacaattgatgcagttacaacgccaagggaaaatcgaagtggtctaccatgtcgatgatcgcgcccgcgtgaagcaattaacggcgattgaaccggcattatcgtttgaacagttagaagaagcgcgggccggcttacgtaagtcagcgcaaaagcagagtcaactcattagttatttacaaagtttaattgatcagcccaatcccttattaaaggatgttttggccaagacgacttttacccgggagaatatcaagacaggcgccgacaaaggttggttacgccaagttaaagttgaagcttaccgaaatccttatcctaaaaccgtcacaacgacgcaaaaaatggcgttgactgatgaacaggctgatgcggtagaagccgttgtagcggctactaaggcccaatctgatcgggtttttctagtcgaagggattacgggcagcggtaagaccgaagtctatttacaaacgattgatgcggtcttgcaacaggggaaaactgcattaatgttagtccctgaaattgctttgaccccgcagatggtcaaacgcgtgaagggtcgctttggtgatcaagttgccgttttacatagtggcttatccgaaggtgaaaagtatgatgaatggcggcgaattgaacgcaaagaagctagcgttgtcgttggggcgcgctcagccgtttttgcaccattggagaatattggtgtgattatcatggatgaagaacatgaagcttcctataaacaagatgaaagtccgcgctatcatgcccgcgatgttgccatctggcggagtcagtaccatcattgcccagtgattctcgggagtgcaacaccatcgcttgaatcgcgtgcccgtgcccaaaaaggcgtctaccaactcttgcgcctgacgcaacggattaatcaacagccattaccggcagttgagttggttgatatgcgcgaggcgatgaagcaacaagccagcagcaatttttcacctgcgctattagatgcgttaaaggatcggttgcaaaagggcgaacagagcgtcctcttattaaatcggcgcggtttttcatcctttatcatgtgtcgcgattgtggctttgtcttgcagtgtcccaactgtgatatctcactcacgttgcatatggatacgcactcgatgaagtgccattactgtggtcatgaagaagcaattccgcggacttgtccaaattgtcagagtcgccagattcgctatttcggaacgggaacacaaaaagttgaagcagaactccaagagctgattccaaatgcccgtattctgcgcatggacgttgatacaacccgcaaaaaaggtgcgcacgctaaattactcaaacgctttggcgaccacgatgccgatattttattgggcacgcagatgattgccaaagggcttgatttccctgatgtaacgttagtcggcgtgattaacgccgataccgcccttgggttacctgattttcgggcaagtgagcgcacgttccaattattgacgcaagtcagtggccgtgctggtcgtgccgataaaaccggtgcggtaatcgtgcaatcttttaatccggaaaattacgccatccaatttgccaagcaacatgattatgaaggcttctatcagtatgagatggcagtccgccatcggggcggctatccgccgtattattttacggtacagttaacgattagccatcctgaagaagcgttggcagccaagaagagtttccacattgcccgtcaattacggcccgtcttatccgaccaagcgattgtgctgggtccgacgccgaagtcgattgcgcggattaataatcgttatttctatcaaattgtgattaaatataaacaggaaccacaacttcaggcgaaactcgccgagattctcgaaacgacccaaattgatacccgtcatggtttcaagattgggttggacaatgaacccctacaatttacttaaagtgagcgtgattgattaatgacatccatcgtatttatggggactccccaattttcagtaccgattttagaagcccttgtggcacacgattatcaagtcctagccgttgtgacccaaccagaccggaaagttggccgcaagcaagtcttacaacaaacacccgttaaagaagcggctgttcgcttaaacctgactgtttttcaacctgaaaaactcagtggtagtcaagaattagcggacgtgatggccttgcaaccagatttaattgtgacggcagcatatggtcaattcttgccaacgaagttattagaagccgctaagattgcagccatcaatgtgcatggttcactcttgccaaaatatcgtggtggtgcacccattcaatatgctgtgttaaacggcgattcagaaattgggattaccatcatgcatatggctaaaaaaatggatgccggtgatatgattgaacaagccagcattccaattgaagcttcagacgacaccgggactttatttgataagttaagttatgtcggtcgagatctattattgaagacattaccaagcattatcgatcaaaccgcgccccggacaccacaagatgaagcacaagtaacgtttgcttacaatattactaaggaacaagaacaattagatatcgagcaaccagcaacgcaactggtcaaccagattcgtgcgttacggccacaaccaggcgcttggttgccaattaatggtcaacggacaaaattatggcaagcaactgttgctgaaacaacgacggatcaaccagccggtgtgattgtcgctatcaacaaaaaggatttcgaattagcagccggcaatggcagtgttttgaagattaccgagattcaaccagctggtaaggctaaaatgccggtccaatctttcttaaacggggttggcaaacaactcgcagtcggacaacaagtggtggtgcaagatgcctaaaaagacaccacgctatttagctgttgaaattttaacggcggttgccaaacaaaacagttattcaaacttggccctcgaccaagtgattaaacaaaaccacttgaatccccaagatgctggttttttaacgcagctcgtgtatggtgtgattcaacatgaaatgacactcgattattacctagccccctttattcaaaaaccagctaaactggcaacttgggtccgccaagtcttacggacggcagtttttcaacaggtttatttggatcgtgttcctgaacatgcgattttttatgaagcaactgagattgccaaacaaatgggccatgctggcacggctaagttggtcaccgcaattctacggaaccaacaacggactggattgcctgatttagcagcaattgccgatccaatcgaacgcctaagtgtgacttacagtatgccgcagtggttagtggcgaagttccaccaagaattagggcaatcaaaattggaacacttattggcaacgattaaccaaccagcgaatgcgtccattcgagtcaatacccgtgttaattcagttgatgccgttttggcagacttacaggctgacgggttaacgattgaatcgagtgtaattgtagccgctggattagttgcccacggcggtcacttagccagcggtgaattgttcgaacaaggcgcgtatataattcaagatgaaagctcgatgttagtggcaccaagtttgcaactacaaccaagtgatcggatcttggatgcttgtgcagccccaggtgggaaaacgacacatatggcgacttatttggatgccagtcaatgggggcaaattactgccttagacattcatgaacataaagtccgcttgattgagcaaaacgctaagcgtttgcatgttgcagacgtcattgatgcgcgggcgctcgatgcacgcaaagtcggtgaacaatttgaacctgaaacatttgataagattttagtcgatgcaccatgttctggcttaggcttaatgcgacgtaaaccggaaatcaagtatggtcgccaagcagcagacttattgaaccttcagaagattcaattggcgattttagaagccgttgcaccaaccttaaaagtgggtggtcaattgacttacagtacctgtacgattgtcccagaagaaaatcaacaagttgttgcggcttttgtggccaatcatccagaatttgaaatcgtaccagtagcactcgacaaaccattgccagccaatcaagcgacaccgtttgtccaaatctatcccgatgattatcaaacagacggctttttcatcgcttgtttaacacgacgggcttaaattattaattgaggtgaattcttatgaaagttgcttttcaaaccgatgtcggccaacaacgccaaaataatcaggactatgtcggcttttataccaataaaagcggtgcgcagtttgcgattgttgctgatgggatgggcggtcatttaggcggcgatgttgcttcagaaatggcggtttcccatattgggtacgagttcgaacgaactgatgataccgacattgaatccatggttaaatggttaattttcgaattacaaaaagaaaacaaacatattttagcgaaggctaatcagtatgatgatttgtttgggatgggcaccacgctcgtcgcagtgttgatttcaggtgccaattacttagttgccaatattggcgacagccgagtgtatcgcttccggaataacgaactccgccaattaacagaggaccattccttggtaaatgaattggtgaaacaaggggagttaaccgaagaagcggcaaagcatcatccgcaaaaaaacatcattacgcgcacattaggcgtttcgcaagatgtcgatgccgatgtaacaatttacgaatttgaaccagatgattatctattattatgtacagatgggctaaccaatatggtcgatgatgaacaaattaagaccacgctgatgacaccgacatcgctggaagaaaaatgtgcggcattaattcaacaagcaaatgatgccggtggcttagataatattacggcgttaatcttacatcaaactggtgaggagggtgcgcgatgatggagacaggctacgcggtcaatggccgctatcagattatccgtccaattggagaaggtggcatggccaacgtttatctggcccaagatctgattttggatcgccaagtagcggtcaaggtgctgcgacttgatttacggaacgatccgaacacggtacgtcgctttaaacgcgaagcacttgccacaactgaattgaaccaccccaatatcgtcagtatctatgatgttggtgaagaaaacagcatgcaatacatcgtgatggaatatgtgaagggaacagatttaaagaagcatatcgttgaacacttcccgattccttatcaacgcgtcgtcgatattatgacgcagattttatcagcggtcgaaaatgcccacgcgcacgatattattcatcgtgatttgaaaccacagaatatcttggtcgatgaagcaggtaacgttaagattagcgattttgggattgcgattgcgctcagtgaaaccgcgatgacccagaccaatacattactcggatcagtgcattatttatcaccagagcaagcacggggttcaatggcaacgaaacgttcagacatctattcactcgggattattctgtatgaaatgttaacgggtatggtgccatttgaaggtgaatcggctgtttccatcgcgattaaacattttcaagatgctgtaccacccgttcgagattatgatccgcggattccacaagctttggaaaacgttgtgttaaaagcaactgccaaagatccggacgaacgctacagtgatgttgggcaaatgaccactgatttgagtacctcattatcagctagtcgggcgcatgaaccgaaattcgtgccctcacaaggtgatatgggtgaaacaaaggtgattccggctctcgacccagaagggattacgcgccaaaacgatgcgccagaagccaaacccaaagatgagactgaagtaaaagacgatcagaaaaagaaacagccgcataagaagtcgaagcggaaatggtggtttgtggggcttggcgtagtcttgttagtgatgctcggggtcttcgctgcgtacgcaatgcaaggcagtgaagtgactgttccagatgtgacagacatgacgcaagaaaacgcgactgcagcattaaccgcagataaattaaaagttggtaagattcaaaaaactactagcaataagtacagcaaagggcatgtgattttatcgacgcctggtaaaggaatgcatgttaaatcgggcagtacggttgatctaacaatcagtacgggtcgtaaaaagtatgagatcgaagactatacggacaaaccgttcacagatgtcagcacgttattgaaacaaaagggactgacggttgtgcgcaaatatcagagttcacgcagtgttgcttcgggactggttttagaccaaagcattgccgcaggtgaaaaagttgtcccaagtaagacgacgattaccttgactgtcagcagcggcaagccaagcattactttacgcaatttgagtaattacacgaaacaggctgttcaagactatgttgatgacgttggtttgacggttactttttcagaggattactccaatacgattgatgaagggttagtcattagccaatcacctggtagtggtgcatctattcaagaaggtgccaatattaacgtggtactttctaaaggtaaaaaagcgcccgctaccaagagttttacgaagtcgattacgattccgtttgataattccttagcaacttcacaaagtagtacaagcagctcgagcgaatcgggtgacagtagtagtacgagctctagttcaagtagtacttcaacggctacgacgaataagattacgatttatttagaagatagcacgcattcaataatgagtgtttataaagaaatgacgattaccgcggatacaaccgttgaattgccatttacgattaaagcggaccaagccggccgtttccggattttaagaaatggtcaagagattctatctgatgaccatgtgacaaactaattgggaggtgacctattgcagacaggacagattattcgcgccctcagtgggttttatgatgtacaaagtgaaggcaaaatttatcgaacgcgtgcgcgtggtaatttccgtaaacggaaaattacgccacttgtcggtgattttgtcgaattcgagagtgaaagtgaaacagaaagtggctatattcttgagattttagaccgtaaaaatgagatgattcgaccaccagtcgctaatattgataatgctgtcgtaattgtttcggcggtggaaccagcattctccttgaatttgttggatcgcttcttgatttatattgaatcgctgcacatgcaagggttagtttatttaaccaagaccgatatgattagtgatcaacaataccaagaaattagtgattacttggcgtattacgcgaagatcggctatcaaatttttgcaccgcggaccgcctttacaccggagataattacggcaattgaagacacgttcccgcataaaacaaccgtctttacaggacaaacgggggccggtaagtcaacgttgttaaaccacattgacccgagcttgaatattgcaactgccgaaatttcgcagagtttaaatcgtgggaaacatacaacccggcatattgaactgattccgttgaatgatgggttagttggtgatacgcctggcttttcatcacttggtttattaaacgtcacgattgaaaccttggttgaccgattcccagagttcagagaaatcgggcaaggatgcaagtttagaacgtgtcaacacgtgatggaaccgaaatgtgccgtgaaagaagctgtcgacagtggcgaaattatgcaaagtcgttatacgaattatttacagtttagagcagaattaaaggatattcggccagtttacaagaagtcaaaataaaaatgtgatcggagttttgatgatgaaacaaatcgcaccttcaattttaagcgcagactttatgaacttacaaagagacgtccaaaaccttgaaaaggcgggcgctgatctattacatgtggatatcatggatgggatgtttgtccccaacatgtcgtttggcccccaagtagtaactggcttgcggccattgacaacgttaggcttagatgtccatttaatggtcgaacaaccagaacgctacatcgaacaatttgcagcagctggttcagacttaatcatgattcatgccgaagcaacgcaacatctctaccgtggtcttcagatgattaaagatgctggtgttaaagcaggtgtggtgatcaatccagggacaccagtcagtgcgattgaaccagtcttatcattggttgatcaagtcttagtaatgacggttaatcccggttttggtgggcagaagtttattccagcgatgttggataaggtcactgaattagcgacttatcgcgatcaacatgctgatgcagattatacgattgaagtcgatggtggggttaacgaccaaaccgtcggtgcgtgtgccaaagcaggcgcagatgttttcgttgccggttcatatacgtttgccggtgatttagcaacccggattgcaactttaaagcaggctgctcatgacgcggattaatgtgttggtgggaggaccagtcagtgagtgggcccccgaattggcgcagccagaaatgattgatggtcaatgggtgacagcagaccgtggtacgtggcgcttattgcaaaaaggcgtaacacctgtcgtgtcagtcggcgattttgattcattgacggcggctgagcggaccaccgttcaatcagcagtaaaggatattcgctctgtgcaagcagaaaaagatgataccgacactcagttggcattatcaattgcgctaactgaatttaatgcggatcaagttgtgctttatggcgcaacaggcggtcggttggaccattttcttgctaatctctttatgcccttagaaacacgttttaagccgtttttagaccgcttagagatgcgcgatcggcaaaatacgattcggttctatgcaccagggacgtatcaattacaaaaagaagccgataaacggtatctggcctttgtgccattagttcccacaactggtttaaatttaattgatgaaaaatatcgcttggtggattaccaaacgcaagtcccgatttcatgggctagtaatgagttcatcggtgagaccggccaattcagttttgaaactggggtggttgcggtgattcaaagtaaggattaaaaagacggctcggataaaattattttatccgagccgtctttttggttgccataaacgtgttcgatcagtcatctcccgatgattagccgacttatctcgtactctttgccaaaaaaaatagaccgccaactggcggtctatcaattgaaattatacacgagttactttgcctgatttcaaagcacgggctgaaacccaaacacgtttaggtttgccatcaactaagatacgtactttttgtaaatttggcttccaagaacgacgagatgcgttcaaagcgtgtgaacgcttgttgccaaatgatgttttacggccggtaataacgtcttttgccatggtcttattcctcctttaagtaaagccggtagaattaacgagaaacataatatgattcagttagtcttaatagttgcatgcatgcacaccggcttatacaattcacttaaataatttaccataatagtttggggaatgcaagagctctttcaaggaaatttacttgacagtccaaaataagtcgtttaaactcattaaagtccaaaaataagccgcatttggggaagaattcatcaccagttgctttgcaactcttctccgctatgctaaaataacaataagtatggcacaaggaggctattttaatggctgttaaaattaaaacacaatatggcgatattgatattaccaataacgtgattgcaaccgtcgttggtggtgctgcaacagatatctacggaattgttgggatggcaagtaagaatcaaatccgtgacaatttaaacgatattttgaatcgtgagaattataatcggggtgtcgtagtccgtcaagaagacaatggcgttgcgattgatgtctatattattgttggttacggcattaagatctctgaagtttgccgtaacgtccagagtaaagtgaagtacaatcttgaaacaatgttgggtgtcagtgcgaactcagtgaatatttatgttcaaggtgtacgggtattagaagactaaaactaattagcggagctggccactaggtccagttctatttgtttttgttcaaggaggaacattcgtgaaagttactgaaatcacagcagcagaattccaagcaatgatgcgggttgctgcacatcggcttactaaaaatgcagaatttgtcaattcattaaacgtctttccagtgcctgatggggatactgggaccaatatgagtttaacgtttcaaagtggggccaaagcagttaatgaaaacaacgcgcaatctgtcggtgaattatctaagagtttagccaaggggcttttgatgggcgctcggggtaactccggggttatcagttcacaaattttccgtggtttttctaagagcatggctgaaaaagaaacgttggatgcacaagatttggctgacgcattcacaaatggtgttcaaacggcttataaagcagtaatgaaacccgttgaaggcacgattttgacggttgccagaaaaggcgccaaagctggtgccaaggttgccggtcaaactgatgatatcggtgcagttatcgaagctgttgttgagggttctaagaaggccttgttgaagacccctgaattactccctgtcttaaaagaagtcggcgttgtcgattctggtggtcaaggattggtcttcatctatgaaggtttcttagaaggtttaacaggccaagcacctgcaaaagatctttacacacctgatgaagcggaaatggatgaaatggtcaatgccaatcatcatcaaaccgctcaaatgggtacagaagatattgaaaatggttattgtactgaaatcatggtcgcccttggtgacgggacaactgtcgatcgcgaatttgattatgatgaattccgcaatcatttaaacggtgttggtgactctctcttagtggtagccgatgaagaagtggtgaaggtccatgtgcatacagaacatccagggacagtcatggcttacggccaacactttggttcattagtgaagattaaagtcgataacatgcgtttacaacatgatacgattgttgaaaacgaccaacaagctgctgcccctgtgcaagcagaacctgttgaaaatgggattatcgcgattgcggccggtgatgggattgctgaactcttcaagagtttaggggctacttatatcttaagtggtggtcaaaccatgaatccaagtacgcaagatattttagatgcgattaaagcagccaatgctaaacaagtgatcttattaccaaataataagaacatcttcttagccgctgaacaagctgccgaagtggctgatattccagttgcaatcgtgcaaagtcggacgattgctcaagggatgaccgctctcttatcatttgacccatctgctgaattggctgctaatcaagaagccatgacagaggcgttagataccgtgattagtggtcaagtaacgcaatcaatccgggacacgactttagatggacttgaaattaagaaagacgattacatggggattatcgatggtaagattaaggtctcaacggctgaacgtttaacagcagccattgaaatggtccaaacaatgcttgatgaagacagtgaaatcgtcacaattattatcggggaagacggcgatgcaacagaagctgaacaaatcagtgatgcaattatggcccaagacccagaattagaagttgaagtacacgaagggaatcaaccagtttacccatacttgatttcagttgaatagttaatcaaataaaacgggaatgaggttgaatatacctggttcccgttttttagtagaagtacgtttaaccttggaatatggttaaaaagcacgttaagaaaaagaagtgtatcaaaagtgcttatcctgtgaggattagtttaattagccgaatgactagcgtagctacttgtttggctaatggtgctaaacgcaacaggatgcttttgaaagcacgttacaggaggctgtcaatgttaagtttaacggattctgttgctgtgttagctggcgtcggcccgaaacgtctgacagccctcgatcagcttggcataaggaccattagtgatttattgtattattttccgtttcgttacgaagatttgaaggtcaaggatttatccgaagcggcagatcaggaaaaggtgacgttaaaaggaacggtcgtcgctgatccggtcatcagtcgttggggaccagggaagacccggctgaatgtacggctcttgattgaacatgacgttgtgatggttactttttttaatcaaccctatcttaaggacaaatttgaagccggggtcgatgtcgctatttatggcaagtgggatgctaaacgtcatacattgacggggatgaaggtcctagcggttcaatcggctgagaatccatcgtttgcggccatctattccgttaataaaagtgtgcgtcaagggacactggtcaagatgattcaagaagcctttgatttgtatcaggacgttattcccgaattgatcccagaggatattcgcacgcgctataagttaatgaacgaacgcgacttaattgctggcatgcatttccctaaaacgtatcctgaagcaaagcaagcacgccgaagcgctatttttcatgagttcttcctatatcagattcaattacaagccattaaacaggctgatcggcatgtggcaaacggtttagctttgcagtaccaaaatgaagcacttaaagattttattcaaaccttaccgtttgatttaaccgatgcacaaaagcgagtggtgaatgaaatttgtcttgatttaaaatcaccagcgcatatgaatcgccttctccaaggggatgttggttctgggaaaacgattgtggcggcgattgcgctgttcgcggcagtgactgcgggttatcaagccgcattgatggtgccaacggaaattctggcggaacaacactatcaaagcttgcaacgcttattggcaccaatgaacgtgactgttggcttattgaccggttcgacgacggctaaagaacggcggacgttgttggcagacattgaatccgggcgcatcaatattattattggcacccatgccttgattcaagatgcagtggtctatcataagttaggctttgctgtaattgatgaacaacatcgtttcggggtcaaccaacggcgaattttgcgtgaaaaggggttacagcctgatattcttgcaatgacggcgaccccgattccgcggacgctggcgattaccgcgtatggcgagatggacgtttcaacgattgatgaattgccaaaaggacggattccaattgaaaccagttgggtgcgtagtaatcaagtcgaacaagccctcagctttgtccgtaaacaacttgcaaacgattcgcaagtctttgcgattacaccgttgattgccgaatctgaacagatggatttaaagaatgccgaggagatttacgcaacgttggtggaacaatttgaacctgattaccatgttgcattgttgcatggccagttaaaagatgatgaaaaaaatcagattatgaacgctttttctgagaacaaaattcaattactggtttcaacaaccgtcgttgaagttggtgtcgatgtgccaaacgcgacggtgatgctcatttttgatgcggatcggttcgggttggcgcaattacatcaattacggggccgggttggccgaggtaagaaaaaggcatactgtattctggtggctgatccgaagaaccaacaaggtgttgaccggatgacgattatgactgaaaccactgatggattcgtcgttgcgcagaaggatttagaattgcgcggaccaggggaagtctttggtgatcgtcaatctggattgcccgtctttaaagttggcgatccagtagccgactttacgagtttacaagtcgcccaacaagaagtgcaaaaaatcttcacgcttgatcctgagttggcagcaccggaccatacgccactcaaaacatacttacaacaacaaaagcaaaattacctaacgttagattgaaaacggaaagaggaatgatgatgaaaattgcagtagacgcaatgggcggcgattttgcaccccaatcagtaattgaaggggtgttacaagcccgctcagaattaacagatgttgaatttacgttgtatggtgatgaagcacaaattaaaccgttgattgatgatatgacgcggttaacgattgtgcataccaccgaaaaaatcaccagcgaagatgaaccagtgcgtgcgattcggcgtaaaaagcaagcttcaatggttctggcggcgcaggcagttaaagatggggaagcagacgcactcttttcactagggaatactggtgcgctcttagcagccggattattcgtgattggtcggattaaagggattgatcgtccaggtttaatgcctaccctaccagccattaattcagatttaggcttcaatatgttagatgttggggccaacgccgaagcaaagccggagcatttgcatcaatatggcttaatggggaacttctacgcacaagacgtccgtggcattcaaaagccgcgaattggtttgttgaataatgggactgaagctggcaagggtgatgagttgcataaggcagcacatcaactactggcagatgatctaacgttaaacttcattggtaacgttgaagcaagtgaactcttaaaaggggttgcggatgtcgtggtcacagatgggtttaccggcaatgcgacgcttaaagcaattgaagggactgccacaatcgtgatgtcgcaagtcaaacatgcgattatggatgctggtgtcaaagaaaaaatcggtggtttactcttgaaaaagagtgttggtgggattcgtgataaattcgacacatctgtttatggcggggctgttttattaggcttaaaagcccctgttgttaaggcgcacggtgctgcagatggccgcacggtttactacactgttcgccagattcatgcaatgctggcgaaccaaacgattcaaaaagtaatcgattattttgaccaacaaaatagcccaaaagaaaccgattaaaataggtggacaatgtgttccaaaggcgctacaatatacttcgcaagtctgatttgatttacttgaattgagttgcgaagttatgtataatcactggatacccaaagtgttaagtacgtaggtaagggtttcaatttggaggtttttaattatgaatgaacaagaaatctttgataagattgcggctattattggcgatcgatttgagttaaataaggatcaggtaacagacgaattgaacttcaaggaagacttggatgctgattcaattgatattgtggaatttgttttggaattagaagacacttttggtgccgaaattccggatgaagaagctgaaaagatcggtacggtagctgatgccgttgcttacattaaaacaaaaatcaaataataaccttaaaaacgagcctgttggttgtgagtattcgcgaccgacaggcttatttttttgcatttattttaaaggaagctgatcttttttgtccgaacagcgttcggattaattttacaatctaccgaatatccaaatttaggcattactgcaaattacagtatccaacatcctgttgtgcaacctgattataataagttccccaagttgccattgcgttaatcacgggactcagtgtttgaccaaattcagagagttggtattcagtctttaacggccggagactaatcaccgttttagtaatcacatgatccgcaattaattcttccagctgtagggctaacatgcggcgcgaacaatcgggtaaagcgcgcgtcaaatcatcaaaatggagatttgaatgttgcaaaagttgataaataatcacacttttccatttacccgagataatttgaagcgtgctttcaaccgggcagcccgcctgacaatcataaatgtgccgttcttgaaccatgaaatggcctcctttgataccgccattatagtccgctagcagtcatttgcctagtgaaaacaatgtaactagttacattcgatacacgattgttacggggcaattaatgttttagactaatggtgaataagaaagaaggcatttttaatgcaagcaattggttttaccaaacatttaccgattacaaatgaagaaagtttaatggcttttaatctccccagtcccaaaccaaaaccacacgatttatgcgtacaagtgaccgctgtttcagttaaccctgtagatgttggcattcgaaaagggggtagaggacaatcaaaaacgccccgtattcttggctgggacgctgttgggattgtcacaggaattggcaatgccgtcacgttatttaaaccgggtgatcgtgtcttttatgttggggactttaaacgaccaggtagtaatagcgaatatcaattagtggatgaacgaatcgtcgcaaaagcaccgcagaatttaacggacgcgcaagctgccgcgatgccgctcacagcgctgacggcttgggaagctttatttgagaaattacacattgattttgaagatcgaaccactaatcatgatcaaaccatcctaatcattaatggggcaggtggggttggttcgatcgccacccaactggcacatttggccggattgcacgtgattgcgactgcctcccgtccggaaacgcaaaagtgggcgctggcccatggtgcggatcaagtcgttaaccatcatcaatcactcattgaacaggtgcacgcactcggctatcaaacggtcgattatatattagagttgaataacatcgatcaacactgggagagtatggcgcgcctgattaagcccaatggccgcatcgcttcaatcactgaaaatcatcgcccggtcgatttacaaaaattaactaaaaaacgggtcgagttcgcttgggagtgggttttctcaaagacctactatcaaacaacggatttagcgagtcaaggcattatcttaggacagattgcaaccttattggaacaaaacaaattgcaatcaaccctgacaaagtgcttaagcccaatttcagcagccaacttacggcaagcgcatcaactggtcgaaacgaaccaaatgattggcaaagtcgtagttgctaattaagcaatcaaataaagcccggtagaagaaatccttctaccgggcttttgctgcttaaaatgttatgtgccgttcattcaaataatgccgtaattcaggcgagagaataattggcgccttttggagcgcttgaatatcgcgtgcgccaagcattgccataatctcttgaatctgcgcttgccaagtgagcaagttttccgccatttgtgtcgggccttcttttaaaaccatgtgcaagaattgaccggaaatcccaacagcactggcaccaagtcgaagtgctttaacgatatctaggggattccgaatcccacctgaagcgaggatattgacgtcattttggaaagcgcgtgattcaaagagcgattcgaccgttgattggccccaatcagctaagtaatcgtaggctttatcatgacgccgttcgttttcgattgtgacaaagttggtcccgccacggccagaaacatcgatgaattgcacaccgatttgcttgagttgcgcgattgtatcagcactcatcccaaaaccaacttctttcacgataacgggcacaccaacattggcgacaatgttagcaatctcgtctaaccagtagaaatcttgatcaccttcaggcatgacaatttcttgtggcgtgttgacgtgaatttctagggcattggcttgggtcattgcaacggcttgcttagccacattcaaatcattaccagcaccaatattagcgagtacaaacccgtggggattgaattcgcgaatcacgctaaatgtatccgctagtgacggatctttaatggctaccgattgggagccagttgccattggtaggttggtaatttgggcgacttgcgctaattgtgcgttaattttctttgtctgctgactaccaccggtcatgccgttgatataaaagggactggcccggttagtcccggcaaaatcggtactgatatccacgtcggataccgcaatttcgggtaagctttgatggataaaccgaattccatcaaagtcattgatggcatcatcatggcggaatttttccgctaaaaagacatgttcatctttccgatgagattgaatggattgtttgggtctgaccatgggtaagctcctaatctacgaggtgaactgcaaggttcaatcgttcaatttgattggcccgccattgttcaaagagggcctctgtttcgatagcgcgatcaataatgacaatcccacaatcaccaccgccagcaccagatgttttggcagcaccgccgattgcctcggctaatgcgcccattttctgtaatattggcgtttcaatagcgacgtgactgaagtgagcgagatcttgtaaaatggcacgattgtggcgtaattcagcttggatctgggctaaatcattacgacgaaacccttcgaccatcgcttctaagcaagctttgctagctgcgaggaagttttgataatcggcttgccgttctgttttagcaagggcaattttatccaccaagtgcgaggttgaagcgggcgaccccgtccaaccaatcaagagtgacaactctgctggcggtgttaataattcgattgaaagactaggccatggcatttcgagcagctccgttagactaacagttggtcgaatgtcagcaagccattgtttatcaaatgaccgataagcgacccagccaccaaaaacactagcagcaatgtcgcctaaagaaccgttgccctgcacatctaaatgcgcaatagcagcaagtttatacaattggtcgtttgatagtgataattcataaaaggcgcagagagcttttaccgttgcaacggttacggcggctgaactgcctaaaccgtattttttaccatcagcagagtctaaatcactatttacccgtaggtggtagacgcgcaatgtcttacccgcttgacgtgcgtattgttccgttaagcgaatcgcggacaaaatataatggaagggattatcgcggttatcaaaaaccatttcatcaccttgtcgttgccaataaagggaattttcttggtattgtttagacacaatactcccatattcatgactctcttcaattgtgactgtcacaaattgatttaaagccacgataatagccggaaaacctgtttctactactgcgtattcgccagcaatatacagctttccgggcgctttagccgttatcaaaccatcagaacctttcacgtttaacttaaatttgcattatcgatagctcacaccaggacctggtttagcaacaaggagttgttcaggactaaaatagggcgcaagcgccgctaaaatctgaggtgtttcctgactggtacaaatcactttcacgtttggaccagcatccatagtataatagcaagaaacaccctgttggcgcaaggtctgcacgactttaattgcttgtagggtttcaggttcaaaataggtgaaaggtgggacggcactaagggttgtcgcatgcatctgcatcgcactttgttctgctaattgccccaccaaatttatatctttcttaacgattgcggccttcattgccggaattgcggcttgagcggtttcaacccatgctgggtagtagggcgacgtggccaccgtattcgccatcccagcacgactggcgatggctttttgacgatcatttaagacaatcgcaatcatctggatgtcccaatcaactgtttcttgaacgggaacagcgtatgaatccaaatcattggtcccacgttgccattccacaaaaccaccataaatcgagcgggttgcagagccagaaccacggcgggctaatctcgaaagatcccgatcgttaagttcaagcccagctgcacgactacctgcagcagctaatgccgcataaccggaagcagaagaggccaacccagcagcattggggacatgattaatggtttccacagcagcaaataaaggcagatgcgcctgttttcgaattaaatcgagaaactgactcatctgcgtactagttttggtatccgcaatggcaccattaaagctaatttggtcagcagtcaaatcagttgaaaagcggaccgttgtatctgtataaaaatgatctagcgtcattgaaagactactgttatacggaataatcaattccggattttgttttccccaatacttaatgagcgcaatattcgtatgtgctctggctgtaattgattgtcccatagtaatactcctaatcttttttaaagtgcgtgtagtggttgaatccaagttttgatggcaccagctgctgataaggcttgtgccaaatcatccgcagcactttgcgtagcggccagggcgataatgcagccaccacggccaccacccgttaacttagtgcccaaactaccggtctgattagccacatcaatcaaatgatcaacacgggcattgctgacaccgagtgcccgcaaatcaagttgagcacggttgaggttcgcgccaagtaccgttaattcgttttgggcaatatttcttgcgacttgttgcgttagataacccaaatggtcaattaagggttgcgtttgttctggattggacatcatttgattctgaacgcttttgacggcggcacctgtttgccccttttgaccgctgtcggcgattacgagatacccttttaaattaatgggtaggggttgaagcggctgccctttgacaaaccataatggtgtagttgcgccggttgttgcggcgtcaatcccgcttggattaccgtggattaaattttcggagagcgcggctagctttagcagccgttgttgactgagctcttgatgataagtcgcaaataacgctcgaatgatggcgacggccgttgcggctgaagaacccatcccgcgttcgggcggtaagtcactttcaatcgtcaattcaaacggggttaagttcggatctaatgcatgccacagttgttcaattaaccggcgaatgccttgcatctgaccaacagcctgttctagaggaccattgtaataagtactcttaatttgcggtgtctggagtgccggctcgagagttaccgttacccgcgcttgaaccgcaaagatggggagggcaatcgcaggttgtccataaacgacagcgtgttccccaattaaaataattttcgcatgactttggccaacaccagtctgcatacaatcacccttaatctctttttctgacttgaagatacccttactactatactgcaaaacaaaaatgaccgccacataaatcaaattgggcacaggttaatgggtttcctattatacccgctttttaccaacggactagccggattttatcccaatcacttgtctatctatggtaaaatgacgccaaaggagtgtgggcgccatgagcttaaaatttattattggtacagctagttatgaccaccatcaaacactagtcaagcaactacaaacagaccttaaggccaccaacacggaccgctttttttatttggtcccgaatcatatcaaatttgaatctgaagtcgcacttttaaatgacctaaaaacccctggaagtgagtatgtcgcaacctcacgcgtccaagtcttctcattaagtcgattagcttggtatttcatgaaaaataccccgtactaccagattccgcggatttcaaccgccgggttaaacatccttgtctaccgcctcttgcaagaacatgcagaagaactcagcttatttggtggggaagtcaatcaaacaggctttgttgctcaattaacgagccaactattggaacttaaagtgggctgtattacacccgatgagctaactgagattgcggcccagctagcgcccgaagaagtcgaactgactactaaattgcgggaaataaccattattgccacggcgtttgaagccgctatgcaaaagcaattcatcgaaaatacgacgttaattgatgccttaactgattatttaaaaaaacaagacttacacgattgtcatttctatatcgaaggtttcgcacaattcacggctcaagaacaagcgctagtcgccgtcttaatgcagcaagcaagcttaaccgtagccttaattaccgactatgttaattaccaacaaccaccggaaaaactcagcttcttttatcaagctgagcgtacgtattatcaattataccaacaggccaagcaaaatcacattcccatcatgactgatcagattgccactaaccagcgggtttcaccaacgttactcgcgcttgatcggtactgggttgcttctgaaaaccacggtcagatcccaacagcaccggaaatcgattcgacgcaacttcaagtgatcggtgccgaaaatcggtataccgaattacggtatgttgcccgtgaaattcgtcgtttagtccaaaccggccactatcgctaccgagacttcttgattatgactcggcatttagccccttatgaaacaatgattgcgccgatttttacagaatacgaagtgccgtacttctgcgatttaccggaaacaatggcggcccatccacttgttgcgatgttggcagcgttgtttgatgtgaaagagcattactaccgctatgaagatgtaatggcgcttttgaagacggagcttttaataccagatgactatcaatcagtcgctgaattccgggctgatcttgatttgtgtgaaaatctgattttaaaaagtgggtatgaagggcatgattggttaagcgcagccgattggcaatattatcggttcggttccttccaagatggtgttcgaacaacagaagatgaagtgctcacggaacggatcaatcggattcggcattatgttcaatccgtattaccaccattttataaacggttagacagtgccaaaacagggcgcgatgccgctaaagtgctctatcaattcttaatcgaacaaggtgtcgatcgacaattgttaaattggcgggaccaagcactcgcagccaatcaaattgccttagctggccaaccggaacagacatggcaaacatttatgacgatgttggatgaatatgtgacgttattaggcgaccaacctttcgaactaaagggcttttgggatttactagcggccgggtttaatacggcgcaatatgcgcaaattccatcgacactcgaccaggtcgttttatctgaatcagggatggtgcagactaaacgccgcaaaattacctttatgattggtgcgaccgatcaagtgatgcctgatcagattgaaaccagcgccttattatccgaccatgatcggcaactattaaccgatcggttcaattcagaacaattcttaactgatccaagtgccagtcagatgagctttgaaccttatctgaactacttggcctttttaagtggtactgaaggattgtatttcacttatccattgaataatggggaaggggcgaactacacggtatccccctatgtcgaccggattaaaaactacttccatttaaccgagcaacgcgttctagcagaagtcattccgacaagtacagcgccaattacgggttcttggcgtagtttgttaagcgatttgattcaagttgcgcgacaagcacaagcgacgcaaacactaattcctgaccaatggcagactgtttatcgtttattacaacaatttcctgttagtcactacttaaccaatcaactccttcaaagtctggcgtaccataaccaacccgttgcactgacaagcgatattgtcactgggttatatggcaatgaaatccatacgtcgatctcgaaattagaagagttctatcaaaatcaatacgcttatttcttaaaatacggcttaaaactgaacgagcgcccaatttttgaactgacacctgcaaataccggtgatttctaccaccaagtcttagatcaatttatcaagatgattcaagcccaacgcttagtcttacccgatctcgataatcaacaaatcgatgcattgacggatgaaatcttacaaaaagcgtatgaacaaccagaatttaagatcctcaataaatcagcacgaatgggctacattcgccaacaattgagtcaaacaattaaacgcgtcagccggacattgcgcgatcagagtcaacgaacgaacttaaaaccgttggcaaccgaagtcttattcggccaagttggtgcccaacaaggattagctggtctagaattcgaattacccaatcaacgtcgggttaaggtgcgggggaaaattgaccggatcgatcaactgacattaaacgaccaagcctacctgggaattgttgattacaaatccagtcaacacagctttagcttccgcgatgcatactatggtttggcattgcaaatgttgacataccttgaaactgtcttgcaagatcaagcagcaattttaccagcgcaaagcaaggtaaaacctgccggggccttttatctgcaccttcaaaacccaacaatgtcattgaagcaactgaacaaacaaaaactcgctcaactacaaaaaggcgaactcgatcaattattactggatcaatttaagtatgatggcttaattttaaacgatgagaccttactcgaaaacttggatacagctttagaaagtggctattcaccactgtttaacttcaatcgtccaaagagtggggcattcaaatcgaaacaactggtcacccttgatgagttacagcaattaattgcccataacgatcaactaatcaaagcagcgggggaagcgatttttgctggcgaaaatgctttgaatccgattatgcggcccgaccgcacgaatgcactcacaatgtcgccatataaatcgattttccaattcgatgcgatgttaccagaaaataattatcgccaattaagtgcgcttgataatcaagccgtcttagccaaaattatgaactcggaggaagaacgacatgagtgatcgccgatttacaccaacccaacaagcagccgttgatcacgcggggcatgatatcctcgtttctgcctcggcgggctccgggaagacaaccgttttagttgaacgcgtgattcaaaaaatcttgaatggcactgatgtggattcactattggtggtgacgtttaccgaagccgccgcatctgaaatgcgccaacggattcaaacggcactgcgaaaaaaagcaagcgaggcaaccgacaaagcggtgcaacaacgcttacggcagcaactcagcctagtcccgaccgcacaaatcagcacgttgcatgcgttttgcttacaagtcattaaacatttctactacgtgattaagttagatcccgcgtttcggttattaagtgatactgcggaacgtctcttattagaggatcaagtttggcaacgcgttcgcgaagaacattaccagtcaaacgacgccttattttatgatttagcgcaaaatttttcgaacgatcgcaacgatgatgggctaaccaacattgttttcgaactgtttaacttctctggtgccaatccagcgcccgatgaatggttacaatctctaaccgccccttacgaggtaccagagactggcctaacaaccagtgcttatttcaaaacaacgattctgccaaagttagaagcgaccttggcaacctgtttaaaagacttggcactcgccaacgaactaagtcaaacaaacgagaaatttgcggtatacttgccaactatcgcaacggcacaagcagcactaactgccattcaagccaacgcggccactttaagttgggcgcagtggcgcacacaattgaccgacgcccaattgggacccgccaaacgaactaagaaattagaacccgatgaacaatatgacaaggaccggatcaaaaacgccctcgataatgtcaaaggggcactaaacgatcttttaacaacctattttgtctttgacgaagcacaaaccagtcagattcaacggcgcgctggtgagttagtcggtaagttagtgacggttacccgcgattttaagcaagccttccaagctgagaagaaacgccgctatttactagattttggcgatttagaacatttctgtttggatattttggccggtgacactccggaatcagaggcagcacgaacgttctatcaaaataaattcagtgaaatcctggttgatgaatatcaagatacaaaccagttacaagaaacaatcattcaaactatcgctagtcaagcaccccgcaacgtcttcatggtgggggatgttaaacaatccatctatgcctttcgattagctgatccgagtttgttcctcggtaagtacgacgaattcgccaagccagataacgatagtgaacgcattattctcgcagaaaacttccgttcacggcgtaatatcgatgatttcgtcaacttagtctttaaacaaatcatggaccgccaattagggcagctagattacgatcacaacgctgaattgcaatatggtgcgacttattatcctgacgatcaaccaactcagccaactgaattacttttatacgaaacaaaaccgactgatgaagaatcaacgggcaagcttgataaagctgaaggtcagattgcatcagttgcacagcgaattaaacgaatgattgataatcaagaaaccatctgggatcgggatacgcaagaaatccggccaattcgctatcaagatattgtcttattgacgccaacgcgcaacaacaacctaatcattcttgattatttccaacggttcggcttaccgattgtcattagtgatgcgcagaattatttccaaacaacggaaattcaaatcatgctatctttcttgaaaattattgataatcccaatcaagatattccactggttagcgtgcttcggtcaccaattgtcggtatgaacgaaaatgaactcgcattaatccggattaatgataaaacggatgactattaccaagccgtttttaattatcttgatcagttcgaagcacaaaaatccggccaactcggccaacaagtcttcgaaaaattaacgcatttccaaaccttattaaatgagttacgagccattgcacgtcaacggccactcgttgatttaatctggacaatttaccaaaagaccggctttttagattacgccggtgggatgccagcaggtcgccaacgccaagcaaacttgcacgcactctatgaacgcgctgcgacttacgaagcaaacggctttaaagggctcttccagttcatccaatttatcgaacgtttgcaaaaacaagataaggatttagcccaaccaaccagtctcgccaatcaagatgccatctctgtgatgacgattcatgggagtaaaggcttagaattcccggtggtctttctaatggatgccaatcatcaatttaacgagcaagacttgcgccaaaattacgtgctcgatgatcaatcgggactcggaattgtttacttagacgcgaaaaaacggttaaagattccaacactaccagaattaaccatcacgacccaaaaacggcaaaagttacgcgctgaagaaatgcgaaaactctatgttgctttaacgcgtgccgagcaacggctgattatcgcgggcagttgtgataaccaagcgaaactatttgcaacttggcaaaaaggacagcaaaatcctgatctgcggttggacgcttctgttcgtcaagctagcacgaacttactagattggattggattgagcttaattcgtcatccgcaagcccgtgattggaccgaagaggggacaccattcctacctctgagcgatgacgcaactgaatttaatttaacgtttacaagtgaaacgcgccttggcgaattaccaggtgctttacaccatgatcaagattggagccagcaacaacaagtggcactcaaggcggtcgatttaacaactgatttagccaacgggattcaagaccagctaacattcagttatccagcaaaaggcgccaccaaaacgacagcttaccagtctgtttcagaagtgaaacggctctttgaagatcccgacaatgatcagttggggcaattacgctttgacgctgatacaccgcaacaaacccatcgttacgtgaccgatgaattacctcaaccacaattcatgcagactgttcgaaaagcgagtccggctgaaattggaacggcgacgcatctggtcttacaagaaatcgatttaacccaaccagtaacgatcgatcgggtgcaaagtgtcatcgaccgacttgttttacaaaaaagcctcactgccaatgttgcacaacaaattaaagttgctgctatcatgacattcttcgagagcgagttgggtcagcaactgttagctgaaccagcgcaagttcatcgggaagtcccattttcactattgttaccggctgcatccttattcgccggtttacgcccagaagatcaagacaatgtcttaatccatgggattatggatggttatgtaaccacggataccgactgtattttgttcgactataagactgattttgtgaacccagctgatccagaagctgccattgaggcgattaaagcgcggtatgccggccaaattaacctatacagtgccgcgttgacgcaaattgctaaccggccggtaaccgctaaatatctctatctattgtcgattggccaactagtcgctattaactagactggtttctacgcgtcattcatagtatgattgatataataatgagtaaagtattggtgacagcatgaaccaagagacaatttacgccgtcgttgatttagaaacgactggcacaaacattaaagaaggggaccgcattattcaattcggatgcgccctcattcaaaatggcaaaatcattcagacgatttcgcaagatgttaatccgcttcgcgacgtaccgactaaaattcaacatttgacgcatatcactgctgatcaactcgaattagcaccgattttcgaagatttagcgccaacgttagttgaactcttatccggtactgttttcgtggcccataatattaactttgacttaccttttttaaatggcgaattagaacgcgtggggcaaccgccacttgatttgccgggcatcgatactgttgaactggctcagatcgtattgccggaagcaccgagctatcgattacaagacctcacacagttactcgccatcgaacatgacaatcctcatcaagctgacagcgatgccttggtaacggctaaattattcttaaaattaatggcacggctgaagaccctgccattagttaccctagaacgtcttagtgcgttaggcgcgggcttgttacgtcaaacaggggatttcttcacagcgattgccgagcagatgcatgcgcaatcgagaccgctgccgaacgatctcttaattcgtgaaaacattgccctacgaaaaccagccgaggaatcatttgaaatctatccgggatctaattttgcggctgattatccagtggaagaagctgataaaaaacgattattaaaaccccacttgaaatggcgtaaagcgcaagctgccatgatggatatgattcacgataatttcgaatctgaggcacctgaaccactattaattgaagcagccaccgggttagggaagaccatcgggtatttactcccctatagttatcgcatgacgcctgaacacaaattagtggttgcaacatcgacaacgctgctacaggatcagattttaacgcaggccagaccgcttcttgaaaaattagtaggtcgccaaattaatgccgaaatcgttaagagcccgcgtcactatttggatttgcatcgctttgaattatcgctccgtttaccacataagaatcggatggtgcggttgcttcagatgaaaatcttagtttggctaacccaaacaacaacgggggatttggatgaactcaatttaacgagttaccaaacaccatttttcaataacgtgcaacaccggggattaacaagtctgcaaccacaagcgccgttttatcaagatgatttcttacgtcgcctgcataagcgccagcaacaagccgaattactcgtcaccaaccacgcctacctggcagagcacgcgaatgatcaccaaacctggggtgcgcgaccatacttggtcttagatgaagcacaaaatatgattttcaatgttcaaaaaattgcgcaacaagattggtcactttcacgttggcaactttggtctcaaaaagggttgcaatatacggatccggaacaggccaataataatttagcccggcttttcccgaaaaaatcaccgcaagcccgctcgttacggttagtgcataaaaacttaaccaagttaggccgaaccatcagtgacttagagacatacctaaccacagcgtttgaactaccgcaaccagaagcgcatcaagcgtttagtgaacgttatttgaatccagatgaagtggttcaatttgtcaccgcttgtcataatcaattcgaccaactgaaccgccaactgttgaccattcaagatcattttctcgcgttgcgttactggcttgaacagcggttagaacaatatacagagggggatttggggatttggcagtcatttgaaaacgaaatcaacctattgttggcggatgttgaagcctatcaacggtttgagcaattattcattgcgacgaaaccgcaggaacaacacgcgttaatgattcagatgacacagcctaaacaacctagtcagttaccacagtttaagctccagtggcaattgctttcagctggtccgcaaatgcaacagatcctcgcgcactttgaaccagtcaccttgactggcgcaacccttgcggttaatgggcacttcgattatttgaaacgtgaacttggttttaccgaagcgcaaccactagcgactaagaaattacgcagtccattccgcttcaagaaacaggcgcgcttttttatcgctgaagatggtcctagtcaaaagaatttagcccccaatgagtaccatcatgcagttgctgaacagctattaacgttattagttggcaatccgcatcaggcgttagtcctctttaattctaatcaggcgttagaacaagtgtattatgcgcttggccgcgccggtttatcgcttgatcgtgagattcttgcccaagggattacgggtagtgcggagaaaattaccaagcgctttatgctggggcacgattcaatcttgttggcgacaagcagtttcattgctggtgttgattttccggaatcagcactggaattagtggtgcttgttcaattaccatttgatgcgccgaatgcactgcagacacgaattcgttacgctcaactttctgcccaaggaattaatccatttaaagcagaggctttaccaaaagcaacgattaaactacgccaagcatttgggcgcttaatcagaacccctaacgatcgcggcgtcttcatttgtttagatccccggttattatcgacccaatatgggcaacaaatgcgccgcgcgttaccgacaagtttgccccaaaaagcagcgtcggttaaaataatccgggaattaaccgacttgttttggttaaattcccactaagattcggttttaagcgccgatagccgttattttttgctataataaggcttattcaagcgaacaaggagagaatgcagcgtgcgcaaatataagagatggctctggatattcttattgttggtaatcattggcagcatgctgatgatttatcatcaagctcgaaaacccgaagcaacggctgaaaccaaagccgttaacattgctaaaaaatacgcgaaattaaaagagcctgatgggttctacacgtatcatcgaaatgcaacatattataccgttagtggtaaagaccgtgataatcacggcatcttcgttttaatcaacgaaaaaggcaatcatgccactgtctatcgtcaaagtggtggtatttctaaaaacgatgcgttagaaaagacatggtcaattaaaaatccgcaaaaagtactgaacattaacttcggtatgtaccgcaacaagcctgtttgggaagttgtctataaaagtgacaaaggccgtctttgttatttaaccctcgattttaaaaccgggaagacgattcaattgattgaaaatatctagggttctcaattagggggctgtggttgtcagggttttgttatataataataactatcagttattttgaactgttgtaaattaaatgttgcacataaggagacagagtttatggttaaaaaaatcagtattatcgatgcaaaaaaccatgtcgatgaagaagttaaaattggcgtttggttaaccgacaaacgttcaagtgggaagatttcattcctccaattacgtgatggcactgcctttttccaaggggttgtcgttaaaagccaagtaagcgaagccgttttccaattggcaaaagatgtcaaacaagaatcaagtatgtgggtgacaggggtcattcatgaagatactcgttcacactttggttatgaaattgaaatttctgacatcgaattaattggtgacagcagcgaatatccaattacacctaaagaacatgggattgaattcttattagatcaccgtcacttatggttacgttcaaaacgcccatttgcgatcatgaaaatcagaaatgaaatcatccgcgcttcttatgaattctttaaccaagaaggcttcatcaagatggatccaccaatcttgacgggtagtgcccctgaagggacaactgaattattccacatcgaatatttcgacaacgatgcttatttaacacaaagtggtcagttatacgctgaagctggcgcaatggcctttggcaaagtcttcacttttggtcctgttttccgtgctgaaaaatccaaaactcgtcgtcatttgactgagttctggatgattgaaccagaaatggccttcacaactcaagatgaaagtcttgaagtccaagaaaaatacgtggcttaccttgttcaaaacgtcattgatcactgtgcctatgaattaaaattattggaccgtgatgttgaccaattgaagaaatatactaaaacaccgtatccacgtatttcatacgataaggctgttgaaatgttacaagcagctgacttcgatattaaatggggcgatgattttggcgcaccagatgaaacttatttatcggatcaatttgaacaaccagtcttcattttgaattatccaaaagccatcaaacctttctatatgaagccacatccaacacgtgatgatgtttacttatgtgctgatttattggcaccagaaggttatggtgaaattatcggtggtagtgaacgtgaaactgactttgataaattagaagctgaaattaaagcaatgggcttagaccttgaagaatatcaatggtacttagacttacgtcgttacggatcagtgccacattctggtttcggattaggtctagaacgggccattacatggatctgtggtatcgatcatttacgtgaaacaattccattcccaagaatgattaacagaatcaaaccataaagagtgctgactcgaacgagttgactttgaggattaacagcaaaacgggcattatggcgcttcacagccatggtgcccgttttacagttaaccggaaaaggcagttcgaagaagcacgtttcaaatagagtgcgttgtagctggttaggttctgagcattaacgttggttggcgaataatcgatgcaatcgattatttgacaatcattgttaagcgcaggaacctagctacaaaagcacgtttgaattagagtgcgttgaaagtggttagttctcgagcatttgtctagtctagtgaatgagcgacgcaagtcgatcgtttgctggacgtagcaaagcaccgaggactactttcaaaagcatgtttcaaatcagagtgctgactcaaacgagttggctttgaggattaactaaagcgccgtgaaccgaaatcaggttctcggcgcttttttatttgtctaaaattggttacaatagaactaatgaaacttttagaaaagaaggctagaatatgaacgaacttaccgcgtttttacaaggcggccaattgagtgtctctcgactgttactgcatcactatcaaacgctcaagatgtcttctgaagaattagtggtttacttacagctcagtgattttgccagtcaaaacaatgactttcccgatttagctgtgattggtgaacgcatgggaattgaatccagccaaatttacgcattgattcatcaacttttacagaaaaaactaattacccttaaatcatctgtcaatgaacaaggtaaggctgaagaccattacgatctcacaccagccttaactaaattgagcgtgctagccgttcaagacgcacaagtcactcaacaagcactagacggtaaccaacggagtgcggtctttaaccaagttgaacaagctcttggccgcccattatcgccattggaatctgagattgttgccaactggttagatttagatcattatcaaccagaattgattcaattagccgtgcgagaatccgttttaaatcaagtctattccttgaagtacgttgataagattttgctcaactggcagaaacaaaatattactgataaagaatccctacaagcttaccaaaaggcccatccaagacgttaatcgaataggagatgaagcggatgttatcaaaagccaaaacacagtgggccatgcaccaactatacaatttaattccagatgcgcagggcgcattagttgctgattcaccgtttcaattgttgattgcggtgatgcttagcgcacaagccaccgacgtttccgtcaataaggtcaccccacaactatttgctgatttcccgacaccagctagtttcgcgaatgcagagattgccgatattgaggctgatattcattcaatcgggttatatcataataaagctaaacacattaaaacatgctgccagcaactaatggcagattttggtggggaagtgccgcgcacacatgccgaattggaacaacttgctggtgttggccgtaagaccgcgaatgtcgttttaggtgacgcctttaacgtcccatcatttgccgtcgatacgcatgtcactcggattgccaaacggctcaaaatcagtgcacaggatgcctcggtgatccagattgaaaaggactttcaagcgaagcttcctaagaaaacatgggttcaagcgcaccacacactcattctttttgggcggcaagtctgtacggcacgtaagccgcattgcgatgagtgtcccttattaaggatttgccaagcaggccaacaatttcttgaagatcgtggttaaaaaacgcaaaaaaagcaccgttcagccaacgtttatcgttgaactgaacggtgcttcttttagttagttggcgctgctggtgtttgtgtcgtcgaccccgttcctggattagttgttgccggaggggttgaggtcgaaggttgcgattgtgaactttcagttggggtgcttgaagatgaggtctccggcacactggaagattcacttggtgtttcaaccacgctacttgagctagaaatttcactgcttgagctgaccggtgcttctgagctagagtagagtacactacttgaagaagatcgactgcttgaagaacttggaatggtcgtcgtccctttaatatagagttctcgtacgccagccacgtttttagcaaccacgttacttggcattgaccaatctgagttggttgcgttttgagcgaggtaggccatcattgctttatagatataagcggcgacgttccgctcactcattgttaatccatttttaagtggttcatcgtatccagtccaaaccgtcactgaatagttcttggtataaccggcaaaccagctatccttcgctaaagttgggtttaacccagatttggcaatttcttcgctagaataatcggttgtcccagtcttaccagcttgatgaagccctggaatttgggctaacgtcccagaaccatttttaataacatcttttaacatatcagtaatcatgtaggccgttgaactcttcatagcctgtgtgccatcagaatcataattatgcgtaatcccatcggctgtttcgactttatggatataagttggtgcatagtaagttccaccgtttgcgaaggcgccatatgcggcagcttcatcaacagttgaaacattcccaccaatcccataagaaagaccagtatcagctggcacgttaatgcctaagcctttcacgaattcacgggctttagtcatgccaacagcttctaacagttcgatggctgggacgtttcgtgagttggcaagcgcattacgcgcggtaattgtaccgagataacggccatcaaagttatgcaattgaatattggttccaggataagtgtaagggacatcttgtagtttctgtgcggttgagtagtcaagatattcgatagctggaccgtaatccattaatggtttcattgatgacccattacttcggccagattgcacggcccggttataaccgagctgcacatcaccagttttacgaccaccaatcatcgcaacaattcgaccgttattaggatctgtaattgaaactgctgtttgtagttgatcatctgggaatggaatactgctatcattattgacgatatcgtataacttacgttgcgcgtccatattgatattggtgtagactttcaaaccagccgtgtacggatcatagccttttttcttcaagtcggcgaggacttccttgacgtaagcgtcggttgctttagaatccgttgaactattcgctactgtttgttgatccactaagccggtattaattgggacttgtttagcttcggcagcttcagttgctgtaatcttattgttccgcaaaagcgcatcaagaactaaatcacggcgcttcttcgctaaatcagggtggaggtacggatcgtaattacttggcgattgcggcatacccgcaatcaatgccagttgtggcaaacttaattccttcaacgacttgccataataatacttagcagccgtccccataccattgaccccgttattcaggtacactttgttcatataatactctaagatttggtcttttgaatattgacgttcgacttgaacggcaagccacgcttcttgtgcttttcgtctgaaagtctgatcgctgtttttcgttgagaatttagacagtttaatcaattgttgggttaaagtactcccaccttgtaagcccagcggtgatttaccagtaatattggcgactgcagcagacgcaattcggattggatcaatcccgaatttttctttatagaaacgacgatcttcaatagagactactgcatcttttaatgtttgcgggatttgatcactcttgacataactccgattttcgccaccaattgttttgaaaggtttcccttgatcatcgtatagaattgtcgcattcggactttgcaggtccgcttgcgttaggtttggtgtatctttaacatagtaggcaaacaaaccaatcccagccacgaaagccactacaatcagtagtaacagccattttagaattcttaaaaagaggggccggcgtttcttattagcgggttttgcttcagctttgtgccttgcaactcgcgaattattattgtttcgattatcggacattgttctttaaactcctttatttgaccgctttaataactgatctacggcatctaagtagggaataattggattaagttggtacttaatctcaatcccattgtcaatcacatcactgagtgaaatcgattttcgtgcaccatcaacttgcgcgtcccagcggctaatcagttctgttgcgggatacaagaatagccgttgtagcgggacaaatttcataatgacaaagcagatgccaccttgattcaagcaggctctgaaatgttcaatctgatgttgatggaagttccgaaacggaaacgcggttttattcttcgtttccttcgcttcaaaatcgacgtaacggccctgataaatcccattatagtcagttgttgaggcttgtttaaaataagcttctttaataaccgcttggctgcgggcagggtagtcgaccttcacaatctgaattggcgttggtttcttatacacgacagccgttgcatgtaatcgataatactgattactatcattgagttcttcttccaacgtcatgccgcgtttaccaaataacgttgttgcttctggttgccgggcttgctttttagttggttttgtctcattatttgtataaggctgtccgttaggataatgaaaggccattgaaaatcacactcctgtttcactattatagcaatgtttagtttaattgaaaatcatttgggagggacctgacttgaaacgactatgggtgagcggctatcgaagctatgaactcggtgtttttggcgaaactgacgagaaacttaaagtaattaaatattcattaaaaaagcagttaacacaatatttagatgatgggctcgagtgggtgatcactggtggccaaatggggattgaacagtggagtctgcaagttgctattgaactaaaaacggactatccggatttaaaattggcgatgatgttgccgtttaatgattttggtcaacaatggaacgaaaataaccaagctcaattgagtcagctcaaagcgcgagtcgatttttgcgaaccagtggttaacgcaccgtattctggaccgcaacaattgcgccagtatcaacaattcatgctgacccatacggatggtcaactattatactatgatcgtgaatcaccgggcaaaccagaatatgattatcatgcagcccgccaatatcaagaccaacaagattatccgattaacttggtcgattttttcgaactacaagatatcgcgactgagttagcggaattagatcagcaagagttttaattatccgataactttgctataatgggaatcatagtacatttattctaaatgaggtgtcaaaatggacaatcaaattgaaatcgaattgaacccaactgatatattgaaaaaagaatttaaaacaaaaatgcggggctatgaacctgaagaagtcgatggttaccttgatttagttattaaagactatcaaacttatcaagaagcaatcgatcggctaacggcggaaaatgcccgcttattcaagaaggttgacgaattaaaccgccaactcagcgcttctgataacgtgaaggaaagtgcaccacaacaagcttcagcagcaaccaactatgatattttgaaacgcttatcaaaccttgaacgccacgtgttcggtgctaagttaagtgaacaaaatcaagctccacagacaagagttcaaaatcattcacaatttgacgagacaaatctttaatcttgtgctatacttataaacattgattcaatatttgtaaatcttgagtaatcgcggtctacatcggtaggctgaggaaggtccatgcccgcacaggctgagatgcttgtagtgttcgtgcctggcccaataagccagggtaccttaacggtaacggcggaaaaagcgctaaaacttcggtcatgcgtgaatatccttaaatagtgccacagtgacggagcgtccttggaaacttggacggtggaacgaggtaaaccccgcgagcgagtaacccaaactttggtaggggcgtctcatttatggaaatgaactaaaaatgagagttcgtaagaacagatagatgattactgaaggaactttcttcctggggaagttctggaacaaaacatggcctataaaggtttacaatcaggtggcttgggcttttgcccaagctctttttatttaaaaaataatttcctaaggggatctttaaaaacatgacttaccaactatacgcaacaatggcgagtgggattgaatccattacggccaaagaattacaaaatctcggttatgaaacacgttcagataatggccgggtgtatttcgaaggcgatgtggcagatattgcaaaaaccaatctctggttacgcagtgctgatcgggtgaaaatcgcgattggtcaatttgaggccaaaaccttcgatgacctttttgaacaagtgaaagctttgccatgggacaagttcctgccattagacgccgcttttccagttgctggtcgctcagtccgttcaacgctccatagcgaaccagacgtgcaagccatcactaaaaaagcgattgttgataagttaagtactgtctatcaccgccgaacacgtttagctgaaacaggcgcaacgtatccgcttgaagtcagcatcctaaaagatgtcgtgacgatcagcttagatacaactggtcctagtttattcaagcggggctaccgccttgaaaaaggggaagccccattgaaggaaaacttcgcggcatccttaattcttttaagccgttggcaacctgatatgccatttgttgatccaacgactggttctgggaccattgcgatcgaagcagctttaattgggcacaacattgcacccggtatgcatcgtaagtttgcctttgaagacttcgattggatcgatgcttctgttttagaaaatgccaaagccgaagcgaaagcagccgaaaaagaccaaccacttgaaatttttggttatgatatcgatcaaaacatgattgatatcgctaagttgaatgcgaacgaagctggtgttttacatgatatccagttcaaacaactcgctgttaaggatttcaagacagatttaaccaacggggtcatcatcgccaaccctccttacgggaaacgattaagtgaccaaacacaagcccgtgctttgtataaagaaatgggtgatacctatcggtcattgaagacttggagtaagtatattttaacaagtgacttacaattccaagaatcattcgggcaacgcgcaactaaacgccggaaattgtataatggtcggattcaaactgatttattccaatactggggtcgtccagtatggccacgtgcagaaaaagaataaaattttttataaagcattgccgttttcagtcggtaatgcttttttatttactgaaaatcccttataataaagattacttcaataataaggtgagggatcgacttgacagtcattttatcagcagaaacaattcctgaacaacacgtcaaagcactaactgcacaaggtttaacaatcatcgctttagctgatttaaaaccaagtcaactgggtagtattgagattatgtttggttggaataaagatgtaggcccgaaaattttagcagagcccggtaatcaattaaaatggattcagaccgcaagctcaggggttgattatttaccactagccacgttagctaagcaaggggtactggtatcaaacgcacgcgggatgcacgcaaaaccaatcgcacagacggcattaagttacatattacactttacccgtgggatttatcagagcttacccgcacaagcagcgcatcaatgggagcatcatgctattggtgaacaaatgacaaatttggaacaccgcacactcctcatttttggaacaggtcaaattggtgaggaaattgcaaagtatgcccacgtcatgggtatgcacacaattggcgttaatcggcacgagaaacccgttgccaattttgatcagattctaaccgacacggattacgaacaagcattgccacaagcagacttcgtgattaatgtgatgccattaacaccggtcaccaatcggttcttcgacaccaccttttttacgcaactccatcgaggggcttacttcttcaatttagggcgcggcgcttcagtcgacgaagcagctttgatgcactatctacaatccggtcatttggcaggagcagcaatcgatgttgcccaaaacgaaccattaccaagtgattcaccattatgggccacaccaaacctgattatcacgccacatatttcaggttacatcgctgatatccatgaacggctcttcaaaattttcgatcaaaatttacccagttatttagacaaaggtgaattatccgtcaatccggtagacttgtcagccggctattaaaaaacagcgtttgaagtgaaccccaaatattggacgaaactttaagcagctttctaggttgtaaaaattcgatattcaatcggacttttacaacccagttttgttttaattcttgaaaaattatacaatgtatacaaaaagccctaccgtattccggtagggcttttcgttgtgtggagttgctattaatattattttttggtacatccttagtgtagcaaaacctgggcagcattccagttacaagttcagcgaattgtccggaaagtgaacaatatcactaaattgtttagtcacttttaacgatttgctcaagctgcttcaaattaaaacataaccgctcatcaatcacctccggttcggtctgcagattattttcaaaccaacaatctaattggcgaatgattgcaccgccgtaaaagtcttccaagtgatttaactgttgtggcgtgtattgtgctttgtaatggcgcaatgccttatgaataatctgtttcataacctgttcaaaaaagcggcggcgttccggataatccgctagatgatataaattcaagcaaaacatgcgataccgtgtaataaattgaacgacttcatgacagccagattcccagtcgccactcactatactctcatcaactttttgaataatctgttgttcaagtgtccaccgaaataagccgcacatgcccgttggaaaatgattataaaaggtcgttcgtgataaattagccgttttcaaaaaagtcgcgaccgtcaatttcgccactctttgatccattaataattcgattaaaatcattgccatatagcgcttagtcgcttgtcgtcgtgtcatttacccacccgttctaattactattgttattttaccaataaacaatcattaacggtaatattattaacaaagattaattttatagcaatgaaaacgttatctaattattatcgattgcacaaaaaaagcggtgcgaatttgatattcgcaccgctttaacacattaattatttttctaaaccttccgcaactgcttctggatagttggctgtgacaattgcagcacaacgcgcacaaagcattgggaacttatcatctgaaccgatatcagtcttaatcatccgacaacgatcacaaacgtccccctcagcatgcgcaacactaaccgcaatgccatcaaattgtgtggcttctgctgggacttctgagttttgatccgcaattgttaattgtgagacaatcaataattgtttaacatcagcatccaatgaagctaataaagcagcattggcttcgtttggataaagtgttacggccgcttctaatgacttaccgatgaccttgtccatccgggctgtttcaagagcttttaagacatcgtcacggatccccatgaaggcattccaagtttcaactaagtcttcttcaccggcaaaatgttcaacttctggcatttcagctaattgaacgaattcttctggttcgtgtaagtagctccagatttcttcagctgtgtgtggcaagattggtgtcaataacttcgtcaaggctactgctactgcatagaaaacagtttgtatgttacgacgaggtgcatcattttgaccatcgatataaacaacgtctttggcgaagtctaagtagaaggctgataattcgttcgtcaagaacatgttaattgtcttataaactgtggcaaagtcgtaagcatcatacgccgctttacagctggcgatgattgcgtttaagcgcaccaacatgaacttatcaactgaacctaattctgcgtaatcaactgtatctttagcaggatcgaaatcagttgtgttcgcaatcatgaaccgcattgtgttccggatcttccggtaagcttcactgacttgttggaagttttccattgtgactttcacgtctgagctagcatcaactgaagcgacccagaggcgcacaatatccgcccccatttgtttgatgatcttttcaggcaagattgtgttcccaagtgatttactcatcttacgaccgttaccatctaagacaaagccttgtgaaataacagctttataagggctgacttcgccaactgcaacactggtaattaaacttgagttaaaccagccacgatattgatctgaaccttctaagattaagtccgctggataagttaagtcatcgcgagccgctaacacagcttgatgtgatgaacctgaatcaaaccagacatccatgatatctttttcttttgtaaattcaccatttggactcccaggatgtgtaaagcctgctggtaataaatctttagcatcccattcaaaccaaacgtttgaaccatgctctgcaaagagttgcgccacacgttcgattgtttctggcatgacgatttctgtgccgtcttcagcatagaagattggtaatggcacaccccatgcccgttgacgagagataacccaatcgccacgatcacgaatcatgttgtaaagacgggtctttccccattctggcatgaattcaactttttcgatttgtgctaagatttgatcgcggaacgcatcgattgaagcaaaccattgggctgttgcccggaagataacgggtttctttgtccgccagtcatgtgggtaactatgcgtgaagaagtcgagtttcaataatgaaccgttcttttcaagcgcttctgtcaccattgggttggctttatcgtaataaacgccttcaaaaccaggggcatcttcagtcataatccctttgctgtcaacgactgaaaggactggtaacttatatttagtgccagcgttataatcatcttcaccgtgacctggtgccgtatgcactaaaccagtcccagtttctaatgtcacgtggttgcctaagatcaccaatgattcacggtcatataatgggtggcgggctgtcattaattccatgtcagcacccttgaaagtcttcaagatttcaactgattcccaaccaagaagatcagtcatcttgttcaaacgttctgctgccacaacgtatttttggccgtcagctaacacttgaacgtaatcgaaagctgggttaaccgcaatccctaagttagcaggaattgtccatggggttgttgtccagatgatgaattttgtatccgcatctaataagtctttcccatccaccacgttaaacgccacgtacattgatggtgacttgatgtctttgtattcaatttcagcttccgctaaagttgattctgatgaaggtgaccagtaaacgggcttcttacctttatagatataaccttttttagccatttcaccgaagacccgaatttcttcagcttcaaaatcagctgttaaagtgatgtatgggttatcccaatcagcagaaatcccaagacgcttgaaatcttcgcgttgcttgttgacttgttccatggcatagtcgtaacaaagtttacgataatcaacgaggctcatttctttccgcttgataccctttttagccaaggcttgttcgattggcaaaccatgtgtatcccatccaggaacaaaaggtgcgcggaacccgttcattgatttgtaacgaacgataatatctttacttgttttatttaaggcgtgacccatgtggatgttgccgttcgcaaatggcgggccatcatgaagaacgaatgaaggtttaccttcatttaatttttgccgttgttgatagaggttgttatcggcccaacctttttgccaatcgatttcacgattcggtaaacctgctcgcattgggaaagctgtcttgcccaggtttaatgtttctttgatacgcatcaaatcactcctttatttttaaaaacaaaaaaagatcccgccctgaataggacgaaatcttcgtggtaccacctaaatttgaaggtcaatgaccttcctcaacatgcaataacgcgcattaagcgtcccaaattactcaattcatctggaatgaaataaggtgatacaccgctaaacagagcattaccaaccttccaccgtcgttggctcgcttaaatgatgttttgcttgctagtccttatttaaatctgttgcttggttttcaattgggttgtaagaatccgtaacagcttcaaccacttcatctgaatcggtgtcttcgactacatcggagagcacttcatcattgtcatcttcttcgactggtgtttcttcaccagggaaaataatggtttgcgttgttgtcacatcatcttcagcaatttgaccccaaggtttaacttctgcatccgagtttacttgatttgacccatggttgtcaaggtctgtcatatcaatttcagctgaaagagcttgatggtccgctaaatcatctttagctaataaatctgtccattcaggactcttaaccacttctaattgtgattcaagcataacttgtaatctttgacggaaaatccgtgtttgtttcttcaagtcatcggtttcgattgcaatttgttttgcacgttcagttgcatcgtcaatgatgtggtttgatttttcagttgcatcatccaacattgattttgcattcttttctgattcagtttgaatcatttcagcttcttttttagcgttatctttaacacggtcagccgcttcttgtgcaacaatgattgattggttcaacgcatctttcaattcattaaaatacgttactttttcatcgcttgattttaattccgcttttaaactttcattttctgttaaaactgattcgtagtctttaatcacttgatctaagaaatcattgacttgatccggattgtaaccccgcatttttgtgttaaattctttgttatgaatatctaaaggtgttaaaaccattttgaaattcctccatctttttcagcaattattttcttaaaatccccagtgtcactcgatatttttctttacgagtctgaccatcaatcgattggagttgaatccggccaaaaccacgaacagagacgatatctaatagtgctaattcaaaatctggtttatcaaatgcttgccaattcagtttaactttgttggcttgaattaattctttagcgcgttgtcgcgacagattgtaaacagttgaaatgatcgtatccaagcgaaacgagctgacagtcgtttgttcgaattgccaagcgtccttaggcgtcaacaactgtgtatagtcttgttcttgcaaatgaactgatacgcgaccaatcttagtgatttgctcttcgacatagcctgccatcttcttcgtcacaaagaattgccagcgttcttcatcggtcataatatccccaaaaacatcacggtcaatgccagcattcacaagcgtgccaagcaccttcccatgtgataggtttgcaaatttaatcgggtaccgaatctcaaataattgaatctcaaaatccgcatccgttggttcaaagtaatctggagcaatcattgcccgtttccgttcagcagcgttatatccgccattaaagtgataacggacgtcccctttttcaccgaccaaggtttgtaaaataaacgcttgacgcggatctaaaaacgccgttaagattggtcgatattcaacttgtgcttgctcaatccaatccaaaacctgcgcaacaaatggcgcctcgctttttctaaaatgttgatagacatctgcttgattgaccattgattacatccccactaataattgtgcgagtaagccgatcccacgttctactaaatataaaacgaaaaacgcagcaatggctgaaatcccaataccaccgattgcaggaatgaagcggtcaaagatttctaagaaaggttcaactaacttagcaacaaagcgccctaatttactgcccatcgcctctggaatccacgttaataaacaatagattacgacgatgccactataaatccgtaccacatacatgagcatcaagagcacataaaataaaaatagttgcacctagttcacctcaatatcaaaatcattttgatcgacaatatctgaaagattaccatcgatttcatagttcggtggcgtacataagaaaatctgatcaccaacccgttgaatttcaccgttgatggcaaaaactgcccctgttaggaaatcaacaattcgagtggcttgtgtcgcttcaattcgtgtgaagttaacaatcactgctttattttcaagtaaacttttgccgactttttttgcgtcggaataaatccgtggttcacataagacaattttattcattttagtagctcccgcagcttgcatcgagacgacgttattcgggcgaacacttggttcaccttcattagtgacagccgcagtttcttgcgtattagcatattcatcttcatctgacatgccgaaaaaattgctaagactaaacttaccagccatgagtcatcctccttagttattgcgacggcgcttgaaaaatggcggcacatcgtccccattttggttatcttgcttattatcatccgcttgggctgtccgtttgaagatatcgaaatctttcttttcaatttcatcaaatttttcagttgcttgcgcttgctcgcgggcacttggttcgcgacgcatatcccaatctacaaatggatcattattttgttctgatggtgttgaaggcgctgttgtctttggtgctgaattgtttgttgctggacgacgtttgttgttatcttcatcaatcccagttgcaataaccgttacaacaacttcatcaccaagattttcgttgattgaagtcccgaaaatcaagttaacatcgttagttgcagcttgttgcacgataccagcagcatcttgcgcttcaaacaatgacaagtctggtccacccgtgatgtttaagaggacttgttctgcaccatcgattgaaacttccaataatggtgatgaaatagccttcttcgttgcttcagctgtccggttttcacccgttgctgaaccaatccccatcaaggcagagccttggttagccataactgttttaacatcagcaaaatccaagttgacaaaccctggtgatgtaattaagtcagaaatcccttgaaccccttgacgtaaaacattatcggcttctttgaaggcttccatcattggtgtcttcttgtcaacaatttcgagtaaccggttattagcaatgatgaccattgtatcaacatgttgctttaattcagcaatccctgaagcggcgtttttaccacgtttagggccttcaaatgtaaatggacgagtaacaacccccaccgttagtgcgccaagatctttagcaattttggcaacaacaggggcagcgccagttccggtaccgccacccatgccggctgtgacaaagatcatgtcagcgccttttaaggcttcgttgaggacttcttcactctcttcagcagctttttggccgatttcagcagttgcgccggcaccgaggccgcgagtcaacttaggtcctaattggatctttgtttcagcttttgaatcttcaagtgcttgaacgtcagtgttagccgcaataaaatgaacgcctttaacgccttcgttgatcattctgttgacagcgttaccaccagcaccaccgacgccgattactttgatgattgcgccgctattttcttgtgctgcatctaatgaatattccatctgtttttcctcctgttacgactagcccttattcaaaaaagttactaaagaaatttttcaggccttcgaatgcattttttgattgatttttaggtttggttttcttacttggtacttctttggttgttgcttgagatttcattgttgatttcgtcactgtttggtctaattcagtctgtgctacattcccaagtgcgccttggaccaaccaatcaacttccgacaagttagctatgtagttaattaaactcaacccttgggcaaatgatggatgccgcaagcccatttgatctggaatgtataacttcactgggcaattaaagatttccttagccaagtcgacaatcccaggtaaagctgtcacgccaccggtcataatcaccccaccaggcatatcaaaagcgtgtactttatccaattcagctttcaaacgatcaaaaatctgcatcgtccgtgcttcaataatctcagctaattttttctctgtcacttgcactggtaaggcttgaccaacaacttcaattggaatttgttcttcttctgaagcagccaatgaatcagcattaccataatctcgtttagctttttcagcattttcaattgacgtgttcaagaccacggaaatatccttggtcatatggtcgccaccttcttgatcaatcgccgtaaattttaattgatgatcatgaatcacagcagctgtactttgaccaccgccaaggtcgacaacgattgccccaaaatcttgttccccgtctgataaggctagcttgccaagtgctaatgggttcactacgagttgtgatagtgttaaacccgctttttcaatacatttctttaaattatgaatcattgtcttgggtgcggtgaacaaaattccgttcatctcaagccgaacccccatcattccgcgtggatctttaatcccatcaaacccatcaaccgtaaacgattgcggtaagatattgaggatttcacgttcaggtggtaaattccgaaccaatgcggcactggcaacgtcttgcacatcttgaccagtaatttccttagattgatcagagaccgcaatcatcccttggcattcttcgatttgtagttggttggctggaattccagcaacaacccgattaatttcaatatttgctttttgttctgcttgttgtacggcttgttggatagcggtaaccgcttgatcaatgtccacaattgtcccgcgacttaatccgtttgatctagctgatccgacgccaatcacattaagttgtttattaattgattctgcaacaattaccttaattgaagtagttccgacatcaagactgacatatatttttgaattctccattaagtgtgtggaacctccttgcattcaattagaataaaatgattcctatgctaaatagtaccacatttcgactagatttagaaagccaatccaatctttttaaacagtgttaactaattttttgttgaatcagcctcagaattatcaaataatttggcgtaagcgccaacttctaagtcaattcgtcccttaccgtccatttgtttcgccagtgtgggataatatttaattttcttggcaagtgtccgcaaatccccaacaacctcattaccatcattcatatataagtgaacttgataaggattattgttcttaactgttaaacgaatttccgacacagcactttgaatgctgtttggaaaagcttgatatagttttaacccttgctttaagaaggcgtcatttttaaattgactatagacagggctattgccgagagactgcgtcattttcgtctttaaaatcgtgccattttctaagattggataatattgtttatgccgcactagatagcccaccgtaggatattccttaatcgccaatgtcagttgattaaactgatcaactttgacatttacgcttttcaccttaggtagtttctggtgaatccgcttctcaatcgctttttcctgccagatttgtgtcaggacgttattgccaatccgtacgccactcgcattaatcacctgttgatcaggcactgatttagtcccgttgaccgtcatttgttgaacgtcgctaatcggcaacataaaatagattgccacacaagcgcccaatgtgaaagtgctcaataacgctgtcaaccgccactttgtctttgccgttcgttgcgcttttagatgtggtagttgaccactaattgttggtcgcccaggcgttaaccgttgccgacgttgtttcttccaacgctttagttgataagcacgccaaacgtttagtaattggagcggatcgagcgacccatttttagttgtttttttcttcaagtcatccgcccccttcttaacttagatgatagtattaatcacttcaataatgcgatctgaagcgtctggaatccccattttcttagctgctttagccatggcttgttgactatcaggggttgccaaaagcgtatctaatgactgaactaatttgtcacccgttaattgtgcttctggaattaaaatcgctgcgtcttctttaaccaaactctcggcattttttgtttgatgatcatttgttacataggggcttggaatcaaaattgacggaatcccaagtgctgtgatttccgccaaactcgtcgcaccagcacgaccaacaatggcctttaaatctggtaaaatttcaggcatgtcgttgatatatggtacaacagccaaattatcgttgagcgtcatcgtctttaattgtgcttgaacatcatcaaaatgaacccgtccagaaacgaatagcacctgatactctcttgtattaagtgctggtactgcatcgataaaagcttggttaatacttggtgcaccacggctcccaccaaacacaagcactgtcggactgtcagtcttaagcccgaattcacttaaacgttcgtttggtaacattccagcaacttgttgggcccgcggattacctgttaatacaattttgtgcattgggaattggtcgctgactgattcaaaggaaatggcaactttatcgacaaagcgcgccaaaaagcggttggtaaccccggctgctgagttttgttcatgaatcaacgttggcacttttaagcgacttgctgcatatagcaatgccccagaaacatagccacccgttccaatcacaatatcaggtttgaatgttttaatcatttcttttgcctctttaacactgcgcaagaaaagttgaattgttttaatattcgttttaatgcccttcatattcatcgaacgtttaaatccttggatttctaacgtcttaaaatcgatgtcttgatctggcacaattttactttccaaaccgcgtttagtcccaacatataaaacggcatccaacaagtcgcgttgttgcattctttcaattagggctaacgctggatagatgtggccaccagttccgccaccagatatcattactctcattttagaatctccaatttaatctgtaatttgttcgactgccttaataaagacgtctccacgttcttcaaacgtcttgaactgatcccagctcgcacatgcaggcgacaataaaaccacgtcgccggcttcactagcagcataagcttcaggcactgcttttgttaaattatcaactattttgatgacgggaatacctgcttcacgtgctgtctgtgccaacaattgtttggtttcaccatataagatggttgcttttacgtgttcttttagtagtggtaataatggttcgaaagtaaagccccggtcaagaccacccgctaataaaacaattggttgtttaaaactcttcaacgcgacttcggtagcttccatattggttgctttagagtcgttatagaagcggcgaccttcatagctcgtcacaaactgcatccggtgtttaacaccggtaaaggtcgttaaaacatcaatgatcgcatcgtttgattggtccatcaacttagccgccgcaattgcggccaaagcattttcaatattatggtcaccagggacgttaatatcagtcactggcattatcacttcacccttaaaacaaagttggccatctttgacataggcgccagcttcagagttgcctagccgtgaaaatggcacaacttgcgccttagtttggcgactcaattcacgtagttcaggtaagtcccagttgacaacaaaaaagtcgtcagccgtttggttttgaataagtcgcattttcgcagccacgtaattcgcacgcgagccatgatagtccaaatgtgcttcataaatattcgttaaaactgcaatcttaggtttaacggttgttgtaccgagtagttggaaacttgataattctgtgaccatcacatcggcagccgtcactttttgggcgaccgcacttagtggaatgccgatattgcccgcagcgtatgcgtgcccctgggtgcgattttcatctaacatcaacgtaattaacgttgtggtagtcgtcttcccgtttgaaccagtcacactgacccattgggcttcagacacttcgtacgcaagttctggttccgttaaaactggaatcttacgcgcaatcgcttctgccaccattgggttatcgtaacgaatgcccggatttttgaagaggtatgcaaagttgcgctcaaataacgccaatggatgcgatccagtaatgacggttgcccctaattcacgcaattgtgcaacttgaggattgtcttcttgttcctttccgtcattgacggtcacaatcgcccctaattttaataacaatttagcagcattaaagccgctcttccctaatcccaaaactaaaactgcctgatcttgatacgtcgtgctggccttcattaaattcgccctcttctaaaaaattaacagataaattgctgaacagatgatactaaataaccaaaagctgatatcaatccgccattcactccaccctgacatttcgaagtgatgatgaatgggactcattttaaaaatccgcttatggaataacttaaatgaaccgacttgtaacatcacacttgctgtttcaatgacgtatactaacccgaccaatagcagtgagaactctcgatgtaataaaattgacatggctgctagtgcgccaccaagtgctagtgaaccaacatcacccatgaaaatttgcgctggttttttattgtagattaaaaagccaagcaatccgccaataatgctgaggccgaaaatggcgacatcaatttggttttgacgaaaggcgataattgtataagttgcaaatgagatggttgccaagccagcaactaacccatcaatgccatccgttaagttcaccgcgtttgagaaaccgactaaccacactaagacgaatacacaaaagaaccagttacttgaaatagtgccaattactgggatttcaagtgcagtactgaagccttcatggaaataaacagcgatgaagacaatcccaccaataatttgccctaacaatttttgccaagcgcgtaagcctaagttctgtttacggaaaactttaataaaatcatctgaaaaaccgagaataccgtataacaccagaataaacatggcaattaatagactattcgttaactgttttaagaataatcctacccaaatacttgaaacaacagcggcaataatgaataagagcccgcccattgttggtgtcccatttttcttagcgtgccatttggggccttcttcacggattgtctgcccctcttttttaaagcgtaaatacccgataaaaagcggcataaaaatcaccgtaattacaaacccactcattaagggcactaaaaattgtcctgctgccatttcataaactcctttaatccaactatcttattttaattgtacttttatttttttaaccccatctagcaacccattgaccgctaggctttgatgataagcatatccgctacctttgatgtcaatctcaacacctgttaattgcgcgagctttaagaggtcatttttcgaccaacccgtgacatctggcatcgtcattgccccattggtcattaaaatgactcgctgtttaggtaaaatcacactattggcctttggtaattgctggacgactaagttcccactaccaacagaagcggtttgtaggcctaaatccgttaatttcttttgtgcttcatccgttgattgaccaatcacagacggaactgttacttgttgttgtgtgtctttttcagcctttttggtatactccagtgcccgtttcatcattggattgaagacctgtgccaaaatactttcagcactatctgtcatattctgtggctgtttcattgtgacatataaaatatacttaggatcatcagctggtgcaatccctgatacagagaagatataattgcttgcgccggttaaatagccaccgtctagaccagtaatttgtgcggtcccggttttaacggctactttataatctggaatttggtaaacctgacccgtcccataatcttgataaacaacatcttccatattttgtaagacagatttggccgtgctagccttaattggtttaccagctttgattggttttacttgatgatcctgattaatcccagataaaatctgcggtctaatcattgtgccatcgttcgcaatcgcacttgtcatctgaagcatctgcattacattaacgttaatcccttgaccaaatgaagttgtggcctgatctagtggccgaacatattgcaatgtcccctctgtttcgccgggtaattgaataccagttggttttaagaaaccaaacttctgaatgtagtctttccaaaccttaggacccatggcttgttcaagcttgaccatcccaacgttacttgatcgtgcaaaggcttgactcagcggaatcatcccccagccactcgtttgccaatcgctaattttcttatcgccaactccaatcgaaccggattgataatactgattaggattgtaattaccagagtcgatggcagctgccaaggttgcaattttcaaaacagagcctggttcatagccatcttcaactaatgtatctcgccaaatcttgccaattccctttttagtgctggcattaaaggttggtcgttgtgaagccgccaaaatttcacccgttttagcattcatcaagacggcattcatactcttaggcttatattttttattgacgctcgttaataaagtttccatgtatgattgtaaccgagaatctaaggtcaagtaaatatcttggccgtttttagcggcttttactttgtttttcttttgattgatcgtgtatccataggaatcacgggcaaaattcttgtaaccatcttggcctgctaattgtttgttgaagtatttttcaatccccattacaccaacgaggctttgatcagcgccgtcttcgtcctttggtgattgagcgataccaatgacgtgagatgcgaatgttccattagggtacagccgcgtaggggactcattgaagtaaataccggttaaatgttctttttcaatcttccgtttgatgctcagtgaaaggttttggccggcacttccgaattcaacttgataaactgaacggttagctggcgttaattgtttatagattttttcttcactcaatggtagatagcgactcaaaactttcgctgtttttttcttatcagttacatataacggcttcttattaggaccaacgtaatcgtgacttaataccgcatacactgaataggcgttaatatcttgtgccaaaacgttccctaaagaatcataaattgtaccgcgttgtgcgcgaatcacggaatcagctttgtattttttctgtgatcgtttcgttaaatccacccctgcaatatgcccagtagcagcaatgtaagcaaaacgaccggcgaaaactagaaaaatcgccgcgataattagcaataaaagcctgccaaaaacgcgtcgattccgccgtggactcttacgtgtcttaactgatttcatttagacacgttccgaatattattttcatttagtttaagatcatgtttctgggcaaaagcattcagacggtcagagcttgttaattcaccgatctcctgttttaaatcattattgttagcgctgacttgggccatcttttgagtcgtactttctaatcctcgttgtgcattaacaactgcaattttggtggttaacaaactaaccaacatcgcgaaaaagataattccaataactgacgtcgctaatttttcaacagctgaaaaagccacttttttagactggcttgcaactgcttgtttatgtgcagtaggctgcgtttttagcggtgctactggcgtttctaattggcgtgccgtgttagttgccatcatcatcaatccttctagtcaatttctttttgtttttctgcgacacgtagcttagcgctatgtgcacgatggttttcttctaattcatcatctgttggtagaatcggcttgcggttcactaattttagaaccgttttttgttcttctggtaaaattggtaaccctttcggtaaatctgggagcgttgcttgttccttaaacatcgtcttcaccaaacgatcttctaatgattggaacgtaatgacactgatccgcccgccgacattgaccaatggaatagcttgttcgagtgaatcttcaattgcccctaattcatcattgaccgcaatccgaatcgcttgaaaaatccgcttcgctggatgtccaccctttcgtcttgctggtgcaggaattgcttctttaatcaaatcagctaattcgattgtcgtttcaatcggcgcaactgctctttgttgttcaatcttccgcgcaacttgttttgagaacttttcttcgccgtagcggaaaaagatcttaattagttgttgataggtccactcattaacgacattgtaggcactgagttccgccccttggtccattcgcatatcaagtggggcttctttcttataactaaacccgcgttgggcatcatcaaattgtggtgatgatacgcctaaatcgtataaaataccatcaatcttagtcacaccgtgttctgctaacgctgcttttaaatagcggaagttactcttaataaaagtcacttggcccgcttcagcatatttggctaatcgttgtttactacttgctaaggcatgatcgtcttggtcaaacgaataaagatgaccggtcgtcagctgagataacaaatattcactatggccgccgccccctaatgttgcgtctacatacacgccatcgggttgcacattcaaggcatcaaccgtttctttcaataaaacactttgatgtttaaatgtttctgtcatctatttaccatccttctaaaaatcaaaatctaacatattttctgcaatatcatcaaaattctcttcagcttcttcgctaaagctcgcccatttttcctggctccaaatttcaatgcggtttgagaccccgattaatacacattctttttcaagaccagcatgtttagcaagtgtgtctgggatattcacccgaccttgcttatcaggggaacattcgaccgccgctgagtagaaaaagcggacgaacgcgcgggtatcttttttagcgaggggcagtttttttaacttctcttccaactgttcccattcactaagggggtaaccaaaaatacaattgtccatgccacgggtgagtacaaattccgcacctaatgattcacgaaatttagccggcatgattaaccgacctttcgtatcaatcgtgtgatgaaattcgcccatgaacataaccattcacccctttgcccaccttaactgattttagtctaccacaatcccccactttctaccacattttgccaaaaaaaaccaaaatcttatcattttggaaccaattgtacacgatatttatattactagcctttttgaccaaaaaaaacagccatttcgttaaccgaaatggccgtttcacttgttaattaagtaagcttattttgggctgtcgcaccacttctaagcaacgccgcaaaaaattgctcactttaatctaatttttagaagtttaaaatgccagttgcagcgagtgaaccaaaaatgactgagcccactgtggcgattaacattacccaaacgaaaattttagtaatgcgactaaacgtgcttgtttgtttcttcaattattccaccacctagacttttttcttatcagcagtttacaccgaatcacttgaaagtgcaactcagtcctttttatcttttccaaaagacggtacaatgagactattaactttcgaggtgatttaaatgccatttagcacgacacttttctttgcaggcttaccgcccgtctgtgtcgcactcggctactgtatcgaccggttgactcagcgtctatttaaacatcgttttcattatattaattggctaccaattccattgctagtaagtgctatctttctgagtatgccaattttcagtaaagctggctggttcttttgcttagctatctgtctgtggggaatcatctggagcttaacgcgcttttactacgaccgtgcgctgtacctacgtaagtttctacggagttggtggcgctttgtcctcgtgatggccacagcatggtacctatcctttctaatcatcacactcctttaaaccaaaaaaaacggtgtcgactctttcaatttgtcgacaccgctttttttagtttaaaaaatatttccctaacgcgcttaattgcgtaattgtgattgtcggttgcaccgtgattggtaatcgatcaacatcgaaataggccgtcgccacatgggcgttaatccctgcttcaatatctaatgcacgatcaccaatcatcacggttttagttttatccagctgataacgatcacataaatcgttcaaactatctggcgccggtttcctggcaaatccgctctgactcgtaacaatttcagtaaaataatccgctagtccatgcgctgccaaaaatttttctgcagcatcatcacgatgggtcaataagaaattctgaccatgtgcactaatctgtttcaaaatcgccgctgcccccggataaggttgtggcgtctgttgtaattggtgttctaattcatgatattctcgatccaattgttcaaatgaaacattagtttgctgagcaagcatctgcagttcccgtttaattgaagtctgcttaatcgcttggtataagtgcgattgatcgactgcgacttgatgatcacggtaaacctgactgagcgccgtcatcataacaggataagtatcatacaatgtaccatcgaaatcccaaatcgcattttgataactcattaattatccattctcctttgtatcaaataggatagtgactggaccgtcattgaccaaagccacctgcatatcggctccaaattctccagttgcgacgcgaatcccagtcgctgctaatttttgattaaactgttcgtataagcgtttagcatagtccggtttcccagccgcagtaaagcttgggcgattgcccttcttagtgctagcaaaaagggtgaattgtgacaccgataaaatggcaccgtcaacctgggccaacgccaaattcatcttgccatctgggtcttcaaaaacgcgcaattgactaattttcttaaccaagtaatctaaatcagcttcagtatcatcatcacaaataccgaccaataacaaaaagccttggttaatcttaccaacaatcgtctgatcaatcgtgacacttgcttggctcactcgctgtaatactactcgcatattaagtcgctcctatccttgaacccgtttgacttcgtaaacatctgggatgttcttcacggcttccataatcgtttctaaatgatctgtattgcgaatgccgactgtcacatgaatatccgccatcttatcgtgatcaatccgccccatcacgttatttagctgtttcgtatgtgcatttaaggactgtaagacatcgttcaatagtccaccacggttatagccgtagatttccaaattcgcatcatagagttgatcattcttagcgttggtattttcccaactgacttcagtcaatcgactgttcatatctgcccgatcaacgatattcggacaatcgcgccgatgaacagaaaccccacgtccctttgttacatagccaacgatatcatcaccagggactggattacagcatttactcaagtgcactaagacattgtcgacaccttcaataacaacaccgtcttcatgtttgattgtgatatggctaccatttgctttaggccctggttgttgtgaatccttcgctgatagaatctcagcttctaatgctttttgttcactttcttcttttgcccgtcgttctttaatcgttaagcgattgacgactgactgtggtgagatttcaccgaacccaattgctgcaaacagttcttcttcggcattaaaattaaaatgcggtaggatgacagctatctcggctttagtgaggtgttcttttggtgtataaccatcttctaccaacagatgttcaacagccgtccgtcctttttcgacgttttcatcccgatcttcttttttaaagtagcgcttaaccttattccgagcacgcgcagtgaaggcgagcttaatccaatcacgacttggtgtcgcacttgttgacgtcaacatctcgacaatatcaccattacgtaattgatagttcaacggtacaattttgccgttaatcttagccccaacagcgtggttcccgacctcagtatgcactaaataagcaaaatccagtggcactgaaccctttggtagttcataaacatcgcctttgggtgtgaaaacataaacgcgatcgctaaagatatcgcctttgacactttccataaattctgcagcatcatcggaagcatcttgaatttcaagaatttcacggaataaatcgagtttacgccctgattcatccaccttaatctgttccttaacgccttctttatacgcccaatgtgcagcgaccccatattcagcaacatcgtgcatttcttgcgtccgaatttgcacttcaagcggtttgcctttgggaccaatcacagttgtatggatcgattgatacatgttggcctttggcattgcaatgtagtctttaaaccgaccgggcatcggtttccacttagtatggattgctcctaaaacagcatagcagtccttgattgagtcaacaacaacccgaattgcgagtaaatcatacaattcttcaaattgtttatgctggtcgcgcatcttacgataaatcgagtaaagatgctttggtcgtccataaatgtcgtaattcatatctaaatcagcaattgagtctttaatgtcttcaattgcttcttgaatataagattcgcgttgtgtccgcttagaattcatcaggtgcacaatccgatagtactgttgtgggttcaaataacggagcgagatatcttccaattcccacttaatcttactaatccctaaccggtcagccaatggtgcatagatttctaatgtttcgttagcaattcggcgttgtttttcgggtttcaaatgtttcaacgtccgcatattatgcaagcgatcggcgagtttgaccataatcacccgcaagtctttagccattgctaataacatcttccggtgattttcagccagttgttcttggtgtgatttatatttaatttttcctaatttcgtgacaccatcaacgattaccgcaacatctttgccaaacatctcttcaacatcacctaacgtgatattcgtatcttcgacaacatcgtgtaagtaaccagaagcaaccgttgcgggatccatcttcaattcagcaagaatccctgcaacttgaattggatgaataatatacggttcacctgattggcgaacttgttctttatgcacataagctgcaaaatcatacgctttttggacaaaagcaagatgctcagtattcatgtatttctgacataactgtagcacttcctgctgtgaaattactttttcttccggcatcctgcctcactccaattcctcttactcgattaaaaatgtactgaatacaacaaaactgactcaactaattaactgtcgagtcagtttgcttaacggcgttcatacgcagtactaattcctaagtaacttaataaacaataaataggaacgaaccaatagttataatctgcgtagcgcacaaccaccatcaatccaaataaaatcggcaggtacaaaatgtgataccaagctgcatgggtcttttgaacacgatacccaatcataaaggctgcgcaaccattgacagccatgaatagcagtccaatccgccacgttttatcgatgtgcaagacaccaaacactagcggtaaaacgaccgccaagagaatggccactaataaatagcgtacccaatccatttttaaataacgattattcataaatttagtcatgttgtgcccctctgtaaaaagattatatctatcatactataaagtagccaattctgtcacatacgaaatcgcacttaacagatataacggcgcggtctcggcccgtaaaatccgtggtcctaaaccagccatcttaaagccagccgccgcaagcatctcaatttccttgggcgcaacgccgccttctggaccaaaaacacaaagtaatcgatccccagattgggctgtttgtaagctctgaactaattgggaatgctcaccgtctttagctgactcttcgtaagccactaatttaatcgtcgctgattcttgtgcgaccgccgttaaactgttgcgccattcaatagttggtacatgcgtccggtgagcttgttcggctgcttcttgcgcaattttttgaagccgcgcaactttcttagcttgttttttatcatcccagcgtgcgactgagaattggctattacagaaaataaaccggtgtgcacccaactgcgtgcctttttgaacaatccagtctgttttgtcaccctttgacaagccgcatacaatcgtcgtctcaatcggtaattcaactgattttgtaattggcgattgcaccgtaacggtgactgttttgtcagttgcatccagttcagttaattcaccgatgaatgcttgttcatccggcgttaccaattcaacacgatgaccaggctgcatccgcatcacttttagcatatgatgtgcagtttcacccgttaaggtcacttgttgttctacttgaattgcttcatcaataaaataacgttgcatgccatactcctcttaatcgtcgtccgtcttttggcgtgtaatcaatgccacccagtcacccatatgaagggcttcttgaacaacaaaatcattcgccgataacgtttcacggacaagtgcttctttatctgcaataatgccggccagtaataggtgtccattgtcattcaataaagccttggcttggggaatcaagggcacgataatctctgctaaaatattggccacaatcacatccgctttcgttgtaatcccgttcaacaaatcgttgggatgggcatcaatgccagcggtcactgggttgagggcaaaattttccttagcggcatcaaccgcaacttgatccacatcataggcgcgaatatcattgactcctaaatgcgcagccgcaatactcaaaaccccagaaccagtcccgacgtcaattaaagattcaccgccgcgtaaaaccatttctaacatttgtacggatagatgggttgttggatgcgttcctgttccaaaagccatccccggatccatccgaatcagtgcttcgcgttcatcagtcggttgatagtcggtccaacttggcacaaccgttaaaaagcgagttagccgcgttggttgataatatttcttccaagctgtcgcccaatcatcatcggcgacttgtgccaatgtcactttaccagaaccaatcgctaacccaaagtcagtcaattgggcaacgcgttgttcaatcaacggtaatttttccggcacaaaaactgtttctgggaaaaaggcactcactgcagcacccgtttcaaggtggggaatactgtctagatcaataatttgatctggctttgcctttaaatgttcataatcggctgcgtcttcgatttggattccttccgcaccattttccgttaaaatattggcgattgcttccactgcttcattaacagtagcgaccgttacttttgtccattccatgtagcatgtctccttcttaatgcgggttgcttagtatttagggtaagcgtagtattttttcgctaattgatcatctgcttgagcgacagttgcttggaaaacagtgtcatcccagtttaagataaaggtttcttcgtctgattcatcattcacaaaagcggctaattgatcttcgccttcatctaataagtcttgtaaatagttgaaaaagccccgaccgacttgtgcgtttaaccccttgcgaccagcaaatggaatcactgctaaataattgtctgcatattcaaagccgtccatcttactttcatcgaagaataaaatcgcatcttcataactgatttcatccgattcgttcaattcaccattttgatcttcaacggcaattgcttgttccttagtcacgtttaatgtgaattccaattcaatcgcccgagcttgtttgtcccagttgatattcatatccccactaaattgtaaatcatctaattctgcatcgaaaaatactaacatatccatttcagccattatattcaccatatccttttaattagtcgttatttaagtcaattttaaagttgaacgtattaacatcatacctgattatgacttgaatctaaagcaatcattcaaaaaagcccagaacaaaatgtcccagactttcaatcgtaattctacttaatgtgctgcttggttctgaccccaataaataacgtccatactctgatcgtcataacgttggaactcaattccgagtgctgcatcagattctgccatcacacgaccatatagccgcatatcagcttctggcgtgttgccatctgggcgaatggcatgcatcaacataaacttagccatttctgattgtagatgggcttcaatcggggccaacggatcaaaaaccatcgtgacaaaccgaatatcactactatcgccatcaccaattaattcaacaatcggaaacccaccaaaattttgttgttgttttaaataagccaataactggtcaatctgttcttttgtgaaggctgatttataaaagaggaaatgccaagtttgtcgtttcatcgtgtcacccacccgttatttattacatatagtatgccatactgtcaccaacaacgcgaacttagtctttttttggtaattgattcgattttggttggtgatatgcctttttcaagccagcaaatgtcgcttgaatcttttggtaatgcatttcatcgttacgcgcatgcttcactaactgggtaaaatcgtgggactgtaagtccttttctgtttgttttttaaaccacaacatatcatcactccttatgtaattttattatacaacgaaacgttatcattgcagtcttaaatttacttttaaaccaaattgccgtaaactaacactattcattaaaggagtctattatgggaaagaagaaaaagcaaaacgcattatccaaaacattagttgaaaaaattctagataaacaaaaagtggcctacacccaacttgaattcccaacagaggaagtccacaacattgcccaaatgaaggccgatcatctcgatatcgatgaacatcttatttataaaacattggtgctctctggtaagagtaccggcccaatcgtcggtgtcgtcccgattgattgtcatttagacgaaaaaaaattaagccaaatttctgacaacaaaaaaattgcgatggtcccattaagggagctcatggccactactggctacgaacatggcgctaacacgcccgttggaatctgggaacaatcccactatccgatttacattgaccaacaggctgaaaaggaaccattcatctatgtctcatccggtaaaattggccgctcaattcagattaatccgcaagacttacagcgggtcactgaagccacctttgctgacatcagtgaagcctaaaaatatgataagaggggctagaacaattcacttgttctagcccctcttatttttgagtttaatctaagtattgggccaaattagcaccagaaatgatgacttgttccttcagcaaatttggttctttaataatattatgaaccaccgtttcgggtaaaacatcattttgtgcgagcatttgcagagcatcatcttgcatcacgacttttttaaccatattatgtattttaatcgttgcaacatatttttgcgattcccgttcttcaaccacttcgtagttgccgtaataatgtttatctgtcattaactcatccccttaaggttaataatatcatatttcaacaaataaaactaagtaacttatcctataataaggggaaactgttaaaaaataccaaaaaaaagcaaaacaataactgttttgctttttccattatagtaaggagagtacaggattatattaggactatattttaccgtagtaccagtatttctgtactcttctgggacaatattgggacaatagaatttaaaaatttaaatataatgtatttgctttaccagtctttttatcatgaataaaggccgtgtgtttaacagaaccgtctggattatagacatctgatttttttaaggtcatgacatcactcacccgcagtagggtggctttaccaacttgaaagatggtgtagttacgccgacccgcccgaaaactatctagtagagaaaaaactcccccttaagtttgaactaattaatttagaaatattatgtccatttacttcttaacagattttaaaattctatatattaaatacattagataattaaattcttcatttctccaaaacaaacctgtaaacagaatacataatattaaaatcgcaattatggagcgtacaattattcctgttagctcaccaatcagtacaaatgaagtgattgtgtaaaccatccctataattaaaactcctaaaattataaataaatattgcttgattaaaaatgattttacactctttttaaatccgtaatggaatatttgcctattttcccaccaactacttattaaaatagtcgttaatagagtacctgttaggacaccatttattccccaacctggatgctcctatcctagtatttggtacataaatttctgaacagttgtgccataattaataaaacaagataggagcattccaatgaaacgatatcaagatgattttaaagccagcattgtgaagatgcatcgtgaagagaaaagatctattcgctcgctttccgaggaatacggtgtttctccagccgcaattcataactgggttaaaggcgctaaatcagttgagctagaagacggtactgaagtaacgtccaaagaattaaaacaacttcaaaaggaaaatcagcgattaaaggaggaacttgaaattttaaaagctgcggcggtgttactgggaaagcattaggacgaattaattgccttgtcttcatagaagatcagttattgcgacaccgcttatcaattattctttcggcactgaaattaccgcgcagcacctattaccattggaaaagatatcaacctagtcaacacgaacgtgttgataatcagctcaaagaaaaaattaaattgatttgggaaaataattatcgtgcctatggttatccacgaataacgatggtgcttcgcaagtcaggcatctgtgttgggtcaaaacgaattttacgattaatgagggaaatggagattcactctttaatgaatcggcgatttaaaaaacctggcactcatgtggatcattcacaacgccccaatttaatcaagcaccagcccaatgcaaggatatggcgtgctgacattacttatttggaattacgtccaggaacctgggtttatctcagttctatttacgaaccaaaggttcatcaagttcttgctttcaagattggtcgtcagatggaggcgacgttagttgtagaaacgattaatcaggcgcttgaatgtcatcaaaagccacaatattttcactctgacatgggttcacagtacaccagcaacgaagttgaaactttacttgaacggcatcagatcagccactcatactcaaaacaaggttatccttatgataatgggccaattgaagcttttcactcattgttgaagagagagtttgcctttcaaacaactttttccaattttgaggacttggtaatccgaacctcaaattacatcagttggtttaattccgacagaattagaacgagtgtttagaaaaagatgtgccatttattgacataggagcagagtgtactacttcacaaataatttcaacgataaaattaattcagaaattcattttttgaatcatacatttagctaatgctcgtaataatttgattgatataagtttcatcatgcgaatcactaataacacgaccactgggaatctcatttacatattttcctttgataggtattcgtgtctgagcatgcattttaaaccattcgtattcaacatccgcatggccaatatctatcgcttgatagcccaaaatagataaatcaaatgctaataccgttgctgttggtcctaatgcaatcagaattaaatcatcaatatttgaatgttgtcgtgttacttttaatatttctgaataagaagcaaatgcgttgttatgcggacagataattcgctgtacacttttagtgttttcaagaagactattaccaacgccaaatctagtctggtctccttccaccaaaatcacatttttattattccataactcctttaactttttaaagtagcttaaactatcattcttgtttaccctatcaacataaggccttgttatatttgcatcataataaaccttatttttgtcagtaaactccagccacttaaatccatactcaccaattaaaaagcgccatgaatctgcactatagggcacatactgcttaaccgatttaaaaacatcaggaatacaaataatgatgtcctcactatctgatatcaaaattttgcgtagtcgctgtgccagctctggggaattatcttgaaacgaatttttattgttattcatcatccatttaaactcaccgtctccataacgagcaaccgagactttattttttataatatagtctaacgtttccgatatattcatcactttgggcttatcagaaaacaacataaacatcaagtatctgatcagaaatacaggatggcaaagtttcctaaatagctcatataaaaaagagtttgataatttatgtttaaaaaaatcctttattgtatgacgaagtcttttattattcaatctataaatatcctcctaaaacaaactatactcaattaaataaattattattatacaataaataactaattgatggccccacgtcaacaaactctatagtaatataaagtaataagttgactactaaaagtatgctcattattgacttactaatataaaatcctttttttaaattaaaatacataataaaacttacatagaccgcgaaagtagtattacgtgatattctcaaaaaattaccatcaatgaaactcaggggtatagttaacaacccaacacacgcaagcgccatcaatatagtaattttattttttgtattcttatttagctcattgttaagtattatcctacgatagcagaaataaactaaaatgaaactaaataatgcaattaaatcattaattatccaaccgttatgaatgctatcaaactgtaaataattactgacaccccgcattgaagataactgattccccaaaataatgataatattattggttactgttttattcatcatagcaataaacattagaaatattacaacaatatatatcttgagcatatttttcggagaaattcttagtataatatatattaacggatatattaagaatatataaccaagagactgaatagaagcagcaagtaatataaaaataatagaaataacaaatctttttttagtaaaatcaattaaaaaagttgttgaccagactagtaatgccatcattaatgaatttctaatttgaatagcatcataaacgaaaggagaaaataaatacaagatacaaaataaattagtattcttagaactaaatttcctcattgaacaaactaatagaagaaaaataatactatatgttagtatacgaaatcctgtatatgaaattcctgcatactgaaagggagtcatatagagtaagaaacccttatcatatgttgttgctttatacccaaattcatataaagcacgataagcattataatctggtacaaaactacttgtataaccaacaattatagtttgtacaagaaataaccagaataatgatatattactcaatgaccgcacattatttgttagtaagcagccaccgactgcaattatcaataatcctagtaacatttaatcacctaaattcacaaaataatattcatacttaaaactctatggttaattttaaaccactcagtataccattaaaaatacttattaatttatccttcttattgctttcatacaatattactaacgtaattatttttaatagacgtaatattgtcataaatgagataaaatttttatggtactttcgtgaaatataaattatattttgtgccatataaaacttgcggaacgctgaatgattctgtatttcgattttaaatcccaataatttagaatatgtaattttcccaatttcgtgtattaataccgcattattaactctgattatcttatagccgagcttcctaacacgtatgcaaaagtcaaaatcaacccaatctataaacatctgttcatcatattttccaaccttttcccacactgaaacatttgtaagcgctccagatgtaatacacttatctaataacaaagttgcttcacttgcaagagtttcaaaactagtatttctatctcttatggtgggacatataataccaacgctttctatttcaatgaaattaaaatatttttgtaacatatctttttcagctacagaatcttgatcaagagtaagtacccactctgtccgattattttgtaatgttgccattatctgatttaaagcagtagcaataccaagattttttatatttttaatcaaagttatgttgtaacctttaatcaactcagtaagctcattgatattatttgaattattatctacaatcacaagattcttacactgtttataaatagattcaatattcatacgtagtctctcaatatttggattataggttactattccaactccaattttaatcatgataactccttaatacttatcaaataatatttgcaatttacatataacaacaactggaaaaaaactatagttcagtttagaactaaataataattgaaacttttttctaatcgaatctctatacgttgctatgtttgttactaatacttcattatcctctctgaggtactttttaaattcccctgcaagaattctagaagtattatattttaaagattcttcgcggcttaaattaatctcttttaaaattctttttaaagtgatttttccggaagacgttgtattagtttcatatcgcctaaaataaatatatgagtgcgaatcatatatagtctttccgccaattgccaaatttagtctataaatccatgaatcatgtccagcaagttgatttatattatttgtgctaatactcaagttatttaaattgttattaaaaaccatcgtacagcccgctacactacttcttatcatagcatgaccaaaattaatatcttgtaaattatactgtttttcacctaacttttttagatccttatccactaaagtaagtcctgaaaaatataatttgtacttattgttacctttacctaactgtttaatcgcgctaattagtttgtcaggtaaccacacatcatcctgatcacaaaaagcataataatctgcagtatttttagctaatctacataaactaaaaaagctccttgtatatccaaggttatgttcaagaaaaacagttattcgaggatccttttctgcaaactttctaactatattcttagtagaatcacttgaaccatcatcccgtataaataaatgtactttaactcctacctgagaaagcacactttctatctgctcttctaaaaaacattctccattatatgttgataatagtaccgaaactgtctccatactaaattatattctccaagtcatttattatacaaatctactataaatatttaacataattttattgacacattttttatcaaacttttgagcaaccaatcgattattactgcccattttcttacgtaactcgtcattctctagcaagacttcaataccgtttgaaaatccaaaagtatccaacggatcataataatatcctgtaattccctgttttgtataatctctaataccatttatattagaagctaataacggtaaaccactagccattgcctcaattcccgcaagaccaaatccctcacgcaatgaaggcataatagcaaggtcagctattctatatatttcttccacatgaggttgatatcccaaaaaatgtacttgattatttagccctaatctacctaccaaatctctcaaatttttttcctcattaccaataccacataacaataaattaatatttttattctttagtaacgagattgccttaatagtcatttcttgattctttcgcttacttaactctcctacttgtattactgtaaatttattattaatttttaactttaattccttattaataggtgcgttcaaaaatttattagtatcaattccaacactaggaatataatcaacattctttgcatagaacttttgttttgccctgttaaaatcttctttattaatagttattaagtcatcagtaaaaccagataatattttttctattggataaaataacaaccagtctttttttcgcccacctgtgaagaattgaaaaccatgagctgtataaatcactggaatatgttttttctttccaactaatcttgccaaaacgctagctaacggggaatgagtgtgtatcaaagagaaacgagtctcacctgtaatatgaagtaattgtttataggccgtcaaattcgaattaatcgttccgattccacgagaaaaatcgacttgataatataaaacattatgctcttttagatattgtttaaaatccgtaacctgttgcttatccatagaatctccagattcgaaattggttgcaacacttatagtacatcccttatcctgtaacattctaatattgtcgagattgaactgttttatcatcgatgctaccgatgatatcattagaacattctttccctttatcattatctagctccatccccggtcactacaacacgaattgtctcaaagaaaatctcaatatcagtcaataccccaaaatgctttatgtagtacatatcattagcaagcttttgtgctggcgtatcatcgtaaccaccgtgaacttgagcataaccgcttagaccgggtttaaccaataaacgttgctcaaaaccttcaatgtcttcactgaattgttgcgtgaatattggccgttctggtcttggaccaatcaaactcatgtcccctttaattactgaccacaattgtggtaattcatccactcgagttttacgcataaaatgaccaacccgtgttacgcgtgggtcttctttctttgcccacattgcaccagatttcttctccgcatcactatacattgatcgtagcttagttactttaaacgattggcccattagcccaacacgctcttggctatagaagcacttgcccggtgtttctaacttaactaaaatcatagaaattagaataataattgaagctggaatcatcaatagcgttgcgaagattagatcgaataaacgcttaaatggtaaatagatgtgatgaaacggttgatccaatttagctacaaaatcatgttcatctactgtttgtgtatgactggtttggttttccatgataagattccccctaatccgttaacgattcccaatataactttaacccagtcataatatcataatgcggctgatagcctaaacgtcttaatcgtgtaatatctgcatatgagtgcttaatatctccaacacgttcaactttatgaataatttgtagctcccgattaataatttgttcatacacctgaattacttgattaaggctagtatgtttaccggcaccaacattaaaaacttgatgtacgatgttgctacccttcgtcaataggcataatgcttggattacgtctttaataaagacaaaatcacgcgtttgttcaccatcaccgaaaattgtaaattccgattggtgtttagctgcttgcgtgattaatgacaatacccctgaatacggtgatttaggattctgtcgtggtccataaacattgaagaaccgtaccgccactgttggaatattgtatagttttccataatcaattacaaaacgttcagttgcaaatttatcaattgcatacggtgtcaacggatcaattgttgagtcctcacgtttaggtaattcagaattatttccataaactgccgctgacgaagtaaacaacacttttttaacatttaatttattttgacgaattgtttctaagatgaaaatattcgcctcttgattgatttggtgggtttcatacggccgtgccaccgaatcggcaacactagcaatggccgctaataaatagatataatcaaaattctctttgagtaatagttcttgcataaagtcatggtcagtaatgctgtgttcgtaaaaggtcactttagatgagctaggaatgttactcgccaagcccattgataagtcatcaacaataacgacctcatcgccatcttgtattaactgatcaactaaatttgacccaataaaaccggcaccgccggtcactaaaactttacccaattatctttcctccaaattcaactattacctaaataaccaaaacttctttttttctttaacatggtggtactcactcggctctaagacatcgccgttaataatctttttggcgttgtcttgcatccaggtcaccatttccgccccattatgctgctccagcttagcgaacgccttctgcatccggaaattacggccctttaagttatgtgcgtcagaggcaaaaacaaagcctaagccggcatcaatgattcgctgcgtaaagtcttcgacctcagaaccaaatacgcctaagtagctgctggcggtgatctgggtcaagcaaccgctagccacaaaatcataaagcagatcgtgattcttttgaatgccgtgattgcgttcaggatggacgatcactggtgtgataccggctgcctgcagttcaaaaatcattttgtcggtgtattccggcacttcaccgtgggaaagctccaacatcaagtagcgattagtttcatcagcgaacaacacgtcatcatttttaatggcttgcattaagtcaccattgatatgtgcttcttgccctgggaagacaactaaatcgattttagcttcatccaacgctgcttgaaattctgcagtccgctgaatcacgtcagccttatgattggtatatttgccgtccatgtggtgtggcgtcaccaaaatatgactaataccgttatcgacagccactcgggccatcgctaaggcatcagccatggtatgcgccccatcatcacatcccggtaagatatgacaatgtagatcgatcatttcttatcgtccgttccgtaatacccaccgtagtaaccgccagaagctgcatctgtcacgcggttaagtacggcaccgatcaggttttttgagtaaatcgcgcgcccgtaaaacagcccctttaagagcgataccttgggggaccaccaagatcacgccgtcaaccttacttgctagaatttgtgcatcggtgaccctattaactggttgcacgcccagaacaattataccaaattgttccccaaattgcaagaacaaattagccacacgataaatcctattaaatcagtattttcattaatattcatattttatggacttaacttaaccggcggaagcagcggagaaaagctctttgggtgtttgatagccagtttgccggcgcggtaaaaggtttagttagttacttatttatcttctgtcccgtagtagccaccatagtagccacccgtattttctgctttaacccgattcatgatggtgcctaaaattcgtgcattaacgacttctaacaactcttttgccttggcaaccgaacccttttcaacaatcccttgtggtaccaccaaaattgtcccatcaactttgcttgccaaaatctgcgcatctgttactgaaataacgggtggtgtatcaaaaatcactaaatcaaagtgctttgtcaattctaaaattaatttatccattttctttgtatttaacaattcagacgggtttggtggtacgacaccacacggtaaaacgaatagatgatcaaccggtgttttttgaatcgcactatttaaatcgaaggtttcttccgttaatagtgatgttaagccttttttatttggcacttggaaagtttgatggactgttggacggcgcatatcggcatcgaccaataagacatctaccccttgatcagcccaggtcacggcaacattcgcacttaccgttgatttaccttgcgaagggcctgatgacgtgaagacaacactgcgcaacttttgatcgattgatgaaaattgaatattcgtgcggattgtccggaattgttccgcaataactgaagtcggatcagttaaagtaattaaaccgaccccttctttcatactatcttggtctagtttcttttcttttctaaataatcccattttcttaccctcttcttgataagcggctggtacttacgctcataatcgctttcttgattaaatctttttcagcaatattattaacaatccctagactagttaaccctaattcttccgttaaaaatccttcatcttttactgtcttgtccgttagttcacgtaaaaaggctatcccaactcccagtaatagacctaatacaactccaatcaaaacatatagattctttttgggagatactggatttaggttgggacttgcttgggaaataattgaaacattatcagttccactcataattttaggtgctttcttctgaaaagtctgtgctgttgtattcgcaatatctgcagcagtatacgcattatcagcctttacattaatggagaacacttgagagttttgattatttgcaatatcaatcatatttgcaatttgcccctcatttattttttcatcgttacctttattaatcttttcagcaacagtatccataataaccggtttcgtgattaaatctttatacgttgtaatcatttgaacatcagcttgaacttgattcagctgagcgccaacatcagtattttgtttacggttaactagcaactctgttgaagcgctatattgtggtgtaatcaaaaagaatgtcacgataacagctaataatgtacacaccactgtcgatgatagaattaaccggtgatacttacgtaaaataccgaaaatttgctcaatgttgattgtttgttccatgataccctccaaaagttaattaatgcttataactactttgcaacacgcgaaaagaagttaaccatcgctggttagcttcctcccgtgttattttaaatctaattgggttcttaaaagtctcgacatattcgccacttcagatgaactcatcacttggaaagattgtccgtcaatcatttgaccaattcccttcaattgatgcgtcttaaagttcattgcatccccataatttttctggatattaattgcatctttcaaggtaatattggtttgcatattattttctaagacttgtaaaaaattattataattcgtcaccatattcaatgaaaaagccttcttcaaaactgcttgtacgatagattgttggcgcaactgacgaccaaaatcacctctggagtcttcatggcgcattcgtgaaaatgccaatgcttcttcaccattcaaggatacgggccctacgctaaagtgatgtccatcttgtgtgaagtctaaatcattctcaacagtcaccccatcgaccgcatctactaattgttccaagcccttcatgttaaccagtacgtaataatcgaccggtacgttcaagaaggcttgcacggtattgactaccatcggaatgccaccgtaggcataagccgcgttaatcttagccgtttgaccgtaaccaacgattggcacccgtgaatcccgggcgatactcaacatgttggtttccttagtcgttggattgaccgttgcgagcatcattgtatcagtccggcctttttcggttcggcctagttcccctgtatctgtaccgagtaagaggatcgagaaaggcgtcttcttatttagttcgactttttctgaaactttgcgcttattttgtgtcttacctttggatttatacactgtcttggcggtttgattaacatccatatagaccttagctgcgaatgcgcccccggcaagaatcaataccccaagaacaactaaaatcacttttgttaatgtccaccctctgcgccggtgcttatggtgatggtgtcgcttctgttcttctgcagtcatccgtttcgtatcctcctcgaaaaataaacaaaaaaataatcaatcacattacatactatttacatactatttataatcataatattttctattgtagtataacttttattaaaaagaaatctttttctggagtacaccttaataaaaaacacttagttttcacactaaattgtgaataacccccttaacattgggcagtgattcaatattcaagatttttaaataattaaatatttttaaagtatcgaaagtgaaagtgatttacgaaatctaagtccatcaaaaaaccgatatgtaaaaacattagtttgacatatcggttgagataaataattttaattttagagactaaaaataggttgtaatcatccggttgattcccgaattcttacaacctatataattggttaacgtttcaattcatatttgtgctttgtctcattaatttttcggctgtcattcattttgatcgcgccgacgcgcaatgaagtcatgaaccttaccgcgactggcgttaacatgcccatgcagtgcttcttcaatcacaacattcaagacagccccaaccatcagaatcgttgcggaataattcagccacaagagtaagataatcaccgcaccgattgcaccgtaactattccatgacgtgccgaagtaacgaatatacaatgagaatgcttgtgcaagaattaaccagccaaccgttgtcagtgctgcccctggcagaacacttcgcaatcgcattttcacattcggaacgaagaaatagatgaaaatcagcagtaggaacaaggcaatccccgtcactggccattttaaactactaaaaatattaacgtaggtcttaggaatgttaaagattgggactaataattccaaaatttgttgcccgaatgtaaaaacaacaattaaaccgactaataatagaagtaataataatgtactccccaaagaaatcaggcgttttaaaacaaagttctgaactttttcaacacgatacgcgcggttaatactattttttaaggcattaatccccatgctcgctgcccacaacgtccccaagatcccgacggacaataagccatcattgcgtttcttcaatagggactgcagaactggcataatcttgtcgaatatcgtgggcggcaccgccgtttggacgtaatccgccacactcattacatctaactggaagtacggtaagatgttcccgataacgattaatagtgggaagattgataataacgaataatatgcgattaccttcgaattatcactaatgcttgcttctgatgaacgcaacatcattaacttcaccacagcaatcaacttctgccgtctggataagtcctgttttaccaccggtaactggttttgattgtctactgtcatatgtcactccaaattctcttttacacattagtcgttctacctgaaaggcttattttcccgacttcttaaggcatgtttatcatttctattatacacgaattaactatgggctaatagttttctgaaagcaaaaaaaaaaaccttctcattttagagaaggtttctaattttatagtaaatatttagcatccatttctggatcttgtgaggttagaatcttaggaccatctttggtaatcgcaattgtgtgttcatattgcgcacatggtgtgccatctgctgagacgtaatattcccagtcttcgccagggacttcttttgacttgatgtgccatgtgccacctaagatgaccattggttcaattgtgatggtcatcccttctttaaggcgcaagcccttgcccgcttcaccgtatgaaggcacgtttggttgttcgtgcatcgttggttgaataccatgtccaatcaattcacggacgtcaccgtagctgttttcaacttcggtatattgttggatggcgtggccgatatcacctaggcgattgccgacaacggcttgatcaatgcctaagtagagtgctttgcgcgtatcgtccattaatttttgtaattctggtgcgatttcgccaaccgcataagtccagcaagaatcactttcataaccgtccaagttaacggtcatgtcgacactgacaatgtcgccttcttttagaattaagttcttccgtggaatggcatgtgccacttcctcattcacgcagacacaagttgcgtacttgtagccttcaaagcctttttcagatgctttggcaccgtgttgttcgatgtagtcgtttgcgaattcttcaattacccagctcgaaatacctggtttgatgatgtcgcgcaaaccgcgatgaacgccggcaataatggcgccagaagcagccatccctttaatttctcgttcagattttaatgtaatcaaaatgaaacctccaatattgttaccattgtagcctttaattgtatctatttctatattatacgctatctgccattaaaatggacgaatcgtcgctttttagttcaattaaccgtgaaagagccgttgcaccttttcttaataaggggcttttgctataatgccttatagtataattcgttaattgcggccactgagcgccgcgtacgtgaaaggatgtcccaataatggcaactgctaaagtagtctatgcaagtatgaccggcaataacgaggaaattgccgaaatcgttgaagaagccctcgaaagtttgaacgtcgacgttgaaaccactgaaatctctcaagcagatcctgccgattttgaagacagcgatatctgtatcgtctgcagctacacctatggcgatgatggcgatctccccgatgaagccgttgatttctacgaagatctcaaggatattgatttaactggtaaagtctacggtgtctgtggctccggtgatacgttctacgatgacttctgtaaagtggttgatgatttcgcagccgtcttcgaacaaaccggcgcaacaaagggttcagacgttgtcaaagtcgatctatcagcagaagcagaagatatcgaacatcttgaaaaattcgtatcagagattgtcgcaaaacagagtgcgtcataagctcggtcagtatccgagcactaacctagtctggcacaggatactagcttataaagcacgtttcaaggcagagtgcgtttgaaacggttatgctttgagcattaactggatttgccgaataggtgatgcaatcacctatttggtaaatttggttaagggcagaagtatgtttcaacaagcacgtttcaaccaatcttccctgggccgcggttacgtccctttttaccgcggcccttcttttggtcttttagaccttaataaatcaaactaggagctgtctttatggctttcattaaacggttagtgtttaaataccgcgattttttgacctatacgatttttggttttttagcatcgttggttaatatttttacttactgggtatttcgccacaccattatttggccgtatttactcgccaatacaatggcgtggtttgtcgcgaatttatttggcttttttaccaataagtcgcttgtattccaatccaaatacaccacgtttggcgctgtgtgtcgtgaagtgctttcgtttttctttttccgtggtgtatcctttttcttggataacggtttgatgattgtcgccatctccttcttagggtggcagagtatgaccgccaagattatcgatcagttaatcgtcggcattgtcaactacatcaccacccgctacactttcaaaaaaacagaacaacaaatggcactccggggtcggattctccggcgatacaatgctattttgaaaagaggtcacaatgattaaagccattcaacaactcattcaaaaatactgggaacaattaatgtacttggtctttggtgtcttaacaaccctagtcaacatggtcgttttcttcggattagaccactatacaactatcaattatctcgtcagcaacacgattgcctggttcttatccgtgctatttgcctttttcaccaataaaacgtgggtctttcagtcaaaatatacaactttaaaggacttttcccgcgaaatggctagtttctttttcttccgtggtatatcatttataatggatactgcaattatgtttgttgggatttccttattggtatggcccaacatgcttgttaaagtgctagatcagattatcgtgattttagcgaactatgtatttagcaaatggattttcaaagatacttcggaggattaagatgactaagacgatttcaattattgtaccctgttataacgagcaagaatcaattccgcttttctacgcagcagttgagaaagtagcggctactctagccgaccaccgcatcgaatacatcttcgttaacgatggttctgctgatgaaagcctggcggaaatgcgcgcgttacaggcacaagaccctgaacacgttcactacatttcattctctcggaacttcggtaaagaggctgccttgtatgctggcttacaagccgcaactggcgactacgtttcagtgatggatgttgacttacaagatccgcctgaactattacccgaaatgattcacggcattgaagtcgaaggttatgactgtgtcggcactcgccggacaacacgtgcgggtgaaccccccgttcgttcgttcttcgctaaacaattttacaagattatcaaccggatttcacaaactgaaatcgtggatggtgctcgtgattatcgcttgatgactcggcagatggtcaatgccatcttagagatgtctgaatataaccgtttttcaaaagggattttcagttgggtcggctttgacaccaagtacttagaatataagaaccaagaccgcgttgctggtcaaaccagttggtcattctggggactcttcaaatattcattggatgggattgtaactttctcagaaacaccattagccattgcgtccttcgtcggctttttctcattcgcgattgccctgcttgcattaatcttcatcgttattcgtgcttttatttttggcgatccaacaagcggttggccatcactcatttcagttatcctaatggtcggcggtttacaactcctatgcctagggattgtcggcaaatacatcggcaaaatctacctagaagttaaaaacagaccagtgtatattgtgaaagaaaagaaataaagtgcgtttggttgcacttagcaactgagtattaagacaaaaaacagtttgaatccgcacgtttatctcatcaaaaaaagccctcgccattatcagtcaaaatgataatggtcgagggctttttcaatgctcattatttaaacgcttctggtttttcttttgattgaccaaaatgataagcaattgcatctaaaatccgttgagatgcttgtccatcaccatatggattcttggcatgggccattgcttcatatacggcttgatcatctaataattcaaccatggcatcatgaacttgttctggttgtgtcccaaccaacttcaacgtgcctgcttcaaccccttcaggtcgttcagttgtatcccgtaagaccaacacaggtttgcctaatgacggtgcttcttcttgcacaccaccagaatcagacatgatgaagaaactccgtgcagctaagttgtggaaatcaacaacatccaatggatcaattaaatgaatccgtgggtgattgcctaagatatcttgcgctgcttcttgcacaacagggttcaaatgcactggataaacgatttcaacatcatcatgggtttcaacaacttggcgcattaccttgaagacccgtttcattggttcaccttggttttcacgtcgatgcattgttactagaatcattcgtttgtcagcatcaacaacatccaagattgaatgattgtagtcgctttgaaccgtttgtttcaatgcatcaattgctgtattccctgtaatgtaaatagccttttgtgggtgattttcttgtaataagttggcttcacttttactggttggtgcaaaataaagatcactgagtacatctgttaattggcgattcatttcttctgggaatggtgaatacttatcccaagttcttagtcctgcttcaacatggccaatcgctgtttgattgtagaatgcactaatgcttgctgcgaaagtagtggttgtatccccatggactaatacgatatccggtttttcagttgcaatcactttatcaaggttcattaatacgttgctagtaatttcactaagtgtttgtcgttgtttcataacgtccaaatcgtaatctggtttaattttaaaaatttcaagcacttgatctaacatttgacgatgttgggcagttaccaccgtcacagcttcgaattcatctgagcgttctttcaatgctaatactagcggcgccatcttaattgcttctggtcgtgtcccaaaaacagtcattactttaattttagacacaaatttgcctcctaccatttaataagttaacacctcctatattacacgttttataagggtttgccaatccattgcagtcttattcccttgagtcaaatgaataacagtctgaatattaaaaaggacgcctttttaggcgtctctttttaataacattgcttcaacattcgcttgagcatcgcgtctatttctgcgtcactatagtgtaccaacttcgcattcgttaaggtcgccaaacccgtaataatgatccacgcttcgttaataatgcgttcgtgttctgactcactaaccgtttttaacggttgatagtcctccaatctagtttgtgtcaattgccccatgaaaagttgtgcttcatccttaccaaagtggttatcaataaataacgcacggtaaagttctggttcgattgtagcaaaatgaatatagccaatcccgagattgactaaggcatcatctgttcgttgttcttcactgacataccacaccaaacgcgccttggcttgttccaaaatggcttgcttgagattggccatattaccgaattctaaatagatgggttgtgtcgaacagtctagtgccttggcaaggctgcgcgctgtaattgcttttaaaccatccgctaataccatttcgtatgctttatccagaatttgctccgctttaatccgttttgtccgtgccatcgttcccactccttaaccgatcaatccgtttttcaatattatctactgtcactctaccacaaaattaaataacatgaaaacgtttttatctattttacgagttttttaaatcgccatgtgctatgataaacatattaaatcgcccttaaggaggaatttttgatgactactttccaacataatcttgaaaaatacgctgctttagtcgctaaaacaggaattaacgtccaacctggtgatacagtggttttacaaatcgctgttgatcaagctgaactagcccgtgatatgacagctgcttgctacgatctcggagcagcagaagtgattatcaaatggcaagatgatgacatcgatcggatcaatatgcaacacaaagccgaagatcgcctcgttaacgtgccagacttccagaaacaagaatacgattactggttagcaaataacgccaaacggatttcggtgatgtcgagcaatcctgataaccttaagggcctcgatggtgatcgggtcgctgctgttcaaaaggcaaacggtcaagcaatgcttaaagttcgccaagcaacacaagccaacaaaaatagttggattgtaattgccgcagctagtcccgcttgggcaaagaaagtctttcctgatatggacgaacaagccgcaactgataagttatggacagagattttcaaaacaacccgggtagataaagaagacccaatccttgcttgggaacaacatggcaagaaactgcaagccaaagccgctgaattaaacgctgcgcaatacaaagcactccattacacagctcctggcactgatctcacaattgggttacctgaaaaccacatctggatgggtggtcctagccgtagtagtgatggtcgttcattcgtcgctaacatgcctactgaggaagttttctcagcagctgatgccaacaacgtcgatggctacatttcttctacgaaaccattgagttacgctggtaacacactcaataacatgcaatttacttttgaaaacggcaaagtggtcaaagccaccgctgaagaaggcaacgatgtcttacaaaaactcttacaaaccgatgctggggtcaagagcctaggtgaagtcgcacttgtaccagatccttcaccaatttcacaatcaaagatcaccttctacaataccttatttgacgaaaatgcttcaaaccatttggcactcggctctgcttacgccttttcaattgaaggcggcacagatatgtctgaagaggaattaaaagcagctggtttaaaccgtagtcaagcccacgttgacttcatggtcggttccagtcaaatgaacatcgatggcttaacacacgacggtcagattgtccccattttcagaaacggtgactgggctgactaatgattacatggctcatgctccttggcgtctgcgtttgtctaaccaccttcttcattggactaaccgcctatagcgcctaccagaaacaagcgattggtggtctaatcattgtgtgcgttgccggtttagtcttaaccgcaatcgcggcattcttctactaccaagcactgacgcatttataattcgaaagggtcacgacaaaatttttgttgcgaccctttttgatgtgctagactgttggcatactttttgttcactatatcattattcgttagtaataatgattcgtatgtactggtataacaggttttatacaatgtttttgttgtgaacaattgctcaaaaacaattgataatccttctcaattagctataatgaagttaaatcaaccagaggagtccgccattatgaaagaattatccgccagtgcaccacttgaacatcgtttccatttatcagaacgtttgaacattatccgcgccggcgttttaggggcaaatgacggcattatctctgtagctggaatcgtagtgggtgtcgcgagcgcccaccaaagtcagtacacgatttttcttgctggtatttctggcatgcttgctggcgccttttcaatgggtggcggtgaatacgtctcggtcagcacgcaacgtgacacgcagaaatccatgatgcggcttcaaaaagaagccatccaaaacgaatacgctgctgaagtggccagtctacaacggacttacgaatcaaaaggcttacccactccacttgcacatcaggtagcttcagcgttcatgcaaaaagacagtcttgacatcacactccgcgaaaaatacaatattgaattacaccattacttcaacccgtggcatgccgccttttcatcatttttctcattcatgttaggctcattgctgccaatcatcgccatcctagcaattccatacccttacaaagtcagtggaactattggttcaattgtccttgcccttatcgcgaccggttacacgagtgcaacgttaggcaaggcaaaccgactcaaaggtgttttacgcaacgtcttaaccggcgtcttaaccatggtcgtcacctatttaattggtggttctatcggctaagcttcacttttaacctaaaatttgctatgctatatttaatttaatcgtcgccacggggcagttaatcacttcattaggtcaaagaagaagtgattggctgtcctttttttgtggccgatattattaggaggttctattgtgtggcatgggttgatttattgattgcaggattggcagaagtttggtgggcaacgactatgaagatgagtggtgggttcactaagctcaattacacattactgacgattgctggcatgctcgtcagcttcggttttctaattcgtgcgacgaagggattaccattgagcattgcttatccggtttggaccggaattggcgcagtgggagctattttagtcggcatcatcttattcaatgaacacatttctttattaacctggctattcgttattttattagtaatcggaattctcggcattaaaatgacgagtggtcattaaaaaataggcttacccattttgggtaagccttatttattaacgtgttctaattgccaactcgcgatagtttgaatcaactcgattggtaatgccgttacatctttttcgaattgtagtgtccctttgccggtctgacatggtgcgacagcttttgcaaaatgggccatcggttgattagtgggataaaacccgatgtgccgtttattaatgccaaaatagcaaactgctttaggctgataatacccaaccaaaccataagccagcttcatctctgcgtccggtaacactgcccaaagaatggtgtgcattgccagtgcgagtgttcgatcagcatcagttgtaaggcctgcattatattgctcaataactgtcatcttatccccacctttattttgctctcattctagcatgaaaccacaaaaaaagcccaaccgaagttggactcttgaaaaacaataattatttaacagctggtgtaccgaaccattcgatacgtgattcaactgtgtctttgattgcttttgtacctggtgcaagaactttacgaggatcgaagcctttttcagcttgatctttgttttctgcatagtattctttaacagcgtttgaccatgcgatttgttgttctgtattaacgttaacttttgagatacccatttcgattgctttaaggatttgttccttaggaatacctgaaccaccatgtaatacaagtggtaagtcaatagcgtcagctaattcttgtaaacggtcaaagcttaaaccttgccagttttcagggtatacaccatgaatattaccaataccaactgctaagtagtcaggaccagcagctgctaattgtttagcttcttcaacgtcagctaattcgccagcaccgatgataccgtcttcttcgccaccaattgaaccaacttcggcttcaactgagatgcctttagcatgtgctaaagcaacgatttcttttgtctttgctaagttttcttcgaatggtaaatcatgaccatcgaacataactgagttgtaaccaacttcgatacattctttagcagcttcgtagttaccgtgatctaaatgcatgataacaggaactgtgatgttcattgacttgattgtttgttcaaccaagttcttgcataattcgtaaccacccatatatttagcagcacccattgatgtttggatcaagattggtgtgttagtttcttgagcagcacctaagatagcacgtgtccattcaaggttgtttgtgttgaaagcaccaacagcgtaatgaccttcacgagcagctttaaagatttctgtaccattaactaatgacatgaaaaagcctccagattaattgcaacttttgcgttgcgatttttgaatacgaatctattttaacatattttgacctaatataaatcataaatccgtaactttctgaaagtgaaagcgtaatcattctgcttgattattttacaccaattaaaaagcacactagttaatctagtgtgcttttacgacaattgcttcaaagtgcgcccggcgagaatcgaactcgcaacctatcgcttaggaggcgattgctctatccagttgagccacgagcgcctatgagtcatattgtcgcatctgttgttttaattgtaaagttgattttaataaatctttattcatccgttaaaacggcgttcatcgtttcttgacctaaaaagaacacggcaccagccgctaatagtatcgcacccgtaaaaagtgtaaaaatcacggctactgataccccctgctgaattagcgcaccaactaaaaatggcccaaccacaccgccaattcgcccgatgccagctgctaaaccactcccacttccacggacaagtgcaggatattgttctggggtataagcatatagcgccccccatgcaccaagattgaaaaaggataacagcgcaccggccacgagtaacatggcaactgagtttgcattgccaaacaataatgcactgagtgctgttccgattagaaagccacctaaaacacgtttccgcccccatttttcaatcaaccacgctgctacaaagtagcctggtaattgtgccaaggtcataatcagcacatattcaaaacttttaaccaagctgaacccttttaagaccatcacactggggagccataaaaacatcccatagtatgaaaagaccactaaaaaccatacgagccataacataattgttctttggcgatacgctggttcaaataaaacacgcaatcgttgcatgaatggtaccttacggttaatcgtcgtcggttcatgctcttgtttaacatgtttccgtaacacaagtgtgtagatggcgggcaatgacgtgatcaataagaccactcgccagccccaaactggaatgacaaaataggcgagtaaactggcaactaaccacccggctgcccaaaaactttctaacaatacgacagcccgaccgcgcgatgccgttggcgtattctccgagattaatgtcgaggctaccggtagctcgccacccaacccagcaccgaccaataaccggagtactagaaatagactcaacgatgtactaaaggcagatatcccattgccaatcgaaaatactaataaggaacaaagtaaactgttttttcgaccaattttatcagctaaaatgccgaaaatagcggcgccaaaaaccattccaattgaactgacactcccaattaatcccatttgtgcactactgagttgccactctcttgcaagcgcagcaatcacaaacgatagcatccccacatccattgcatcgaacaaccatgcaccacctgcagcccataaaagtgtcctatgttcttttgtcatcccgcattactcccttatgttatgaatggtcctatcatacaaaaagagtttacagatgtcaagacacctaattatgcattataataaatatttatctgtttaagcgctgcgacaatttgcttaaatcgttgttctgacgcgcattcaatcgtgtgtaaatgaatgccgtcggttaatgttgaaagtaatttctgatggggcattgtggccattttttgcataaagcctttgacatctgtcaaggtgccgattcccagttgaccggtcagttcaccatacaatggatgatcaacggtcacgtcgatcacgcgccccccattttcaacaatcgttgtcaattcaagttcagtctgcccctgattatgctgacaggcaacttgtgcctgatatggcattgtttgttgcgtctgcgtttggtcgtaataaccgctaactgtcgcaataatttgggccccttgtgcgcgaagtaaggcgatatccccaacaattgtctgccggctaactttatattgttgcgctaatactttggcactgatgggttgcgcactcttttgaattgcattcagaattgctgtacgtcgttcttgcgttgtcatattgccacctcgtcttgatttcttacgctatattctaagcgttctaaaggcaaaaagaaagtggagggttgaaacgaactcgtttttccggttaacctaaaaatacatattatggcttatataaatattttttgaatatttattcaatctcgtttgacccgttatttcgttagcaatgagcttttctctcgctgacaacatagaatactataccaacaatccaagacatcgtcaagcgattgtttacttttttttgaataaaaatataaaaagtttcaaaagcgtacattgttgaatagatattcaccgattgtccgaactaattcaagtgcggaacactcgtgacttctaacttatccagtaatttcgtgaactcactagggttcgcaaatcgaaaaccggcttcactaattattctcaattgttcggtataaaaatcagtctcatgagctccccactgaaagacaaagaacgaaacgttctcaccttcaaggttaatattcgctaaattgatcaatctcaattcgttaacatcaatatttagctgtgcttggattgcaattaatacagcagcaagtggtgtttgatcatcttgcttattggtcaccagcatcttataagaagcatcaacttgtggttggaccaaaaaatcatattgtccttgctctgtcttatacataatcgttccggctactttagcactcatacattctcacccttattcaagtcttctatcgcttcttcagtccatcttggtaatcgttctgcaatgggcgcaaacccaatatgaatccggcgatttgtccaatagtgtttcttagcacgctgtggtgctaaatcttgtgctttatgtagcgcacgtaacgacaaactaatcttatgtgtgtattcatcgatatctaacactaatacatctaacacttgaccgactttaaactgttcatctaacgctttaacaaaaccatgaccacattctgagatgtggattaagccttggaccgttgcatctaatgaaacaaatacaccatatggttgaatgcctgttacagtacctgtaatcttttgtccaattcgataacccatattttcctccatttcaatattcctatctattttaagccttccagttagtaaaaggcaagctatcggctaagaccttttatacaattccttctataatatgtaaaaagaacctgaggaaacatccctcaggttctcatttaactaaagttgatcagctgctagtaaaagtgccccagtaatcccagcgtcatcccctaatgcaacatgcacgatgtagtcatcaaggtcaggcgtttgcacataacctgccatttgacgtttaaaggattcacgaatcattgggaatagttgggcttgtttcgacaccccaccaccgaagacaattcgttctggcgatagcattaaagcaatatttacacaagcttgagctaaatagtcagcttccatttgccatgcttgatgatcagccggcaataagtggcctttcttgccccaacggcgttcgattgctggaccagctgctaagccttccaaacaattgtggtgataaggacatgtcccttcgtatgaatcttctggttgttgccgaattaacatgtggccgatttcaggatggctgtaaccttgtaaaatctgaccgtgttcaacaacaccgccaccaatccccgtcccgacagttaagtaaacacaactatcaagtccatcagcagcgcccatcttcaattcaccataggctgcggcattcacatccgttgtaaaagcaaactgggtatcaggataatgagctttcattgctcctaagatatcatagtgttcccaccctgctttgggtgtatcgatgattgagccatatgtttttgatttcgggttaacatcaattgggccaaacgatgccaaaccaatggcatctaaatgatcgaattgatcaaaatattcaaataaccgtggcatcgtttgttccggcgtctcggttggcatactaattcgttcttgtatcccattttttccatctgttacggcacagacaaacttcgtgccccctccttcaattccacctactagcatctaaaacacctcttcaattaaaattaaagattaatcgtaatgtgattgatgataacttcttcaactggtttgtcttgcattcctgtttctgtagcgttgatcttattaacaacgtccatcccactcaagacgtgaccaaatacagtatgtttaaaatctaaccaaggtgtaccacccttttcataagccgtaatgacttcttctgggtaaccagcacctggcatttgtgacaacatgttttggttgatatgttcgtttgttacgatgaagaattggctgccgtttgtattaggaccagcattagccattgataatgcaccatttaagttaaagacttcttggttgaattcatcttcgaaaggttggccccagagactttcgccacccatcccagtaccggttggatcgccaccttgaatcatgaaatcgttgatgacccggtggaaaatcacaccgtcatagtaatctttttcagctaagccgataaagttttctactgtcttaggtgcttggtcttggaaaagtgctactgtaaattcgccacggtttgtgtcaaaagtagctgttggccctgcaaagtttgcaaggtctaattgtggatatgtcatttaatcgtcctccttgttttgactcacaatcattatgatagcgaattgcttcataaattactacgattatttcattaaacatgctttccttatttttttctagtatactaatttaagaaatctactattaaggaagttatctcatgcttgattcaaatcatctctttgatatcaccattattggcggcggtcctgtcggaatgtttgctgcctattatgctggtatgcgcaaggccgatgttcagattatcgaaagtctccccgaactcggtggtcaagtcgcaacactctatccagaaaagcaaatctatgatgtcgctggtttcagtggtatctctggtgcacagctcaccgaaaacttaattgaacagctggcacttttccaaccaaccttgcaattatccactgctgtgcaaggtatcgaaccccaagaagatgggactttcgttcttaaaacaacgaagggcacgacacgcaccaaaggcatcatcattgccgttgggaacggggctttcacaccgcgaaaactcgctgtcgattacgatccagaatgggaaaatcactatattcactacttcgcaaaagaaatggcgcagttcaaagatcaaaccgttgccgttgctggcggtggtgattcggccattgaatgggcactaatgctcgaaaaagtggctaaacaagtctatttaattcaccgtcgggatcaattccgcgggcttgaaagtagcgttgaagcactcaaacaatcaactgtccaaattaagacgccgtttttaatcgatagtttgaccgaaatgaaccaacaactcgcattaactttaaacaagatgaaatcaaccgatcaagagcagctaacaattgacaaactccttgttaactatgggtttatctctgatactcgaattctccgtgattggggattaacattggaccaccatcaagtcgctgttaaccaacaactcgagacgaacatcccgaacatctatgcgatcggcgatattgctacctaccctggtaaagtgaagttaattgccagcggatttggtgaagcaccaatggctgtgactgagttactaacgaatctctacccagaaaaacgccaaccactacacagcacgtccattatgtaagagtgcgcaatatgcccgattaccttctgaggattagcctagtccagtaaattagcgacgcagtcgatgatttactggccgtagctaaccggaagaaggtggcttatggagcacgtttcgataagagtgctttaactagcggttagcttctgagtatagcatcggttagtgaatgagccgcacagccgaccgtttgcaaaccgtggctaaacggaagaagttgctagctaaagcacgttttaaaaaagccctgcatcaacgttttaaccgttgatgcaggactttttagtattttattaagcattattttttttcatttgactcttaaccgctgtgataaccatcggaatcaatgagaccccgataatccctaacacaacgagtgagaaatgttcacgcacaacagcaatgtttccgaagaagtaaccagctccgcaacagagtgtcacccacaagatactcccaatcacgtcgtaacggaagaacttcatgaaggccatctggctcccaccggcaacaaatggaacgaatgttctaataatcggcatgaaacggccaattgcaatggttttaccaccatacttatcaaagaagacctgcgcctcttcaattttctcggtattgataaacttgccgaagaaccgattcttcgtggcggctaaaccgacccgttggccaatttgttcattcaatgaatcacccgcaattgaggcgattaagaacaaggcagcaaacagccagacattcaagtcattatcagtccgggctgccaaagcagcagcggcaaacaaaagcgagtcccccggtagaaacggtaagataaccgccccggtttcaacaaagataatggcaaacaagatgacataggtccagttgccgaactgattaacaatgttgaccaggtgggaatcaatatgtaaaacaaaatcaattaactgcgtcatgcgatttctcctatactctttttcaatttaaaaatatatcccttattaggataccgaatccatgcatcaaagcaatcacttttgcattttcttaataaaaagccaaacgttatagcgcacgtttaccgcgccataacagccaagcaaaactaccctctaacaaaatgaagaagagtgtaaaacaaaggccaaaatagacttccggtaacactaagataatcggatcagtgattggatcaaactgccagttcagattgcgaaacaataattcgtggaacgtaatgaaaaaccgatcgaaattcatactagcaataaaccctaatatgggtggcaccacaagagcaacttgcattgggcggacgtattgccaaacccgattggtcttgcgccgactccgccaatgctgaatcgccgctccaatcgttactagccaaataactactgctaaaccaaacaagcgtttcacttcaacaaaatgttgccgaccatccaatgacattggaaagtcaggtagttgtaagcgtggttgccatggcacaagtaagtagcccattaaccggttaaagttcatcatcagccgcggttgcgttaattcccgttgactcgctagatcgaggtagtgactcactagcggataaagtgcccagcttaacaataacgttattaaaatcgcactgctgactaacgccaaatacaacgccgcccaactagtggtacttctaacccgctttaaacgtcccattcggttaagtcgttaatgatatgcgttggttgcaaggcttcttttgccacatcctctggcgttgaaacaccagtgtaaactaacaacgtatccatccctgcattcaagccagccttgatatctgtattgtagttatcgccaaccatcaccacttgttccttcgtcaagccgaattgctctaaggccatttccataatgattttttcaggcttaccgatatagagtgcactttgttgcgttgcccgttcaaccatcgcaatcactgaaccagcacctggcactagcccgcgttcgtttggtaaattcgtatccgcattggtgccgatgaataatgcaccgcgcttaatcgctaacgttgctaattcaaacttgtgataagtcacatcataatccaaaccaactaccacgtagtctggatcgaattcattggtcctaaaaccggcatctgatagagcctgcttcaaaccgagttctccaatcacgtagaccgttttgccattcgctgtaccaccgtttaaattcaatagatagcgcgccgttgccaaagaaggggtatacacttggtcaactgtcgcatgaatgtcatggttatccgccaaattctgaatcacagcagctggtgatttcgtagtgttgttcgtcaaaaacatgaacggaatttgttttgcttgtaggcgttcaatgaaatctttggcttctggcatccgatcacggccgcgatacacggtgccgtctaaatcaattaaataccctgcataatctgtgtttgtcatagttgtctaactccaattacgttttactttttattgtgttccaaaggacggatcttaaaatgacgcttattaactgatttttgattctcggttaccgccttttgagggcgttctttagtcactttttgcttgttatcggtgactttccgttctgtaaaacctggcttttgacgccgacgccgttgctgaccacgttggcgattactccgccgattctcattcttaatgattggcttgccttgacgttccaaaacaaagtaggcacaaccaaagttgcagtattcgtatagataatcttgtaacgtattgattaattgatctttattagcgcgtttgttggttgctttgtaaaagcccttcaaacgcagttgttcaaagccccagtcagccacaatataatcgtacttagccaacacttcattatagcgttcgttcaacttttcagcgtcgaagccttcacgatagttcacaacgacttcataagcacatttatcaatctcaagcgtggtttcagtcttcatgacaacgtgttgtggcacttccggttgtttggctgaagcgatcatttctttttcaatcgccttggtcactttcttggcaatcttgggactgtttttcgtatccgccacagcgaacctcctcttcccttataagggataatgtttacttaaatatttagcgaccgcgtctctgagaaaatcagggaacacgatctcggtctcgccaacaatctcaattgttggaaagaatggaatgaatagataatgatcgacggtcgtcaacgtatagctggcttctggatcaatttcttgcccatgccaaaagacgcgccgcaatttcatatcaaccgctatcccgtcataaacgatgtctccaaagattttaccacggaaactcatccctttaataggaaacttgcgtaaaaagagccggtttttctccatttcaagcaccatccgccacaaatcataccctttgagcgtcactttaatcagatgcattggatgcggtaattgagtttgcaaatcatctttagtaacaatcccagcctgcaaatcttgcaagaacaagccagtattcaatacggcagcttcagtgctggtcgcttcttcaattgcctttaaaccggtcgtcatcatttctgattcaccaattgcgttgattttaaaagcgtgtggcaacttggcaacatgctcggcggctaattgtgcgtgcccctttttcaggtagccttcaatttctgctgcgtcagtcttcacaactggtaagtccgcggttaaaaccgtccgagcacttttatgcatcacatggtgctgatcatccagttcaagcgtgatatcaccaaggtaatgaccgtacttctcggcagccgtcaataaggtttgattaaccagcagcccctcttctaaaagatgatgcgtgtgcgcaccacagacgacatcaatctcagggaattgttccgccagccacttatcagtcgtaatcccaagatgtgataggacgattaagatgtcatattgaccttcaatcgccgctaattgccgcggcaactcttcactgacagtcgtcggttcccaaccattcggccgataagttaagaaaaatggtgcggtcaaggcaataattgctacccgcgttccagcatcggtcgtcattagtcggtaagattgcgcaaatgctggcctttcgtttgttgcttgttcatacagattagccagtaataccgggaaattcgccttatcatacaaatgttccagatcagcatgactattaccgattccttcattgtttccaatcgttactccgtcatacccaatttgattgagtaactcggtattaatctgaccattcgttgcttcagtcaatggatgactacgatccattgcatccccgatgtcgaaggtcaagaccgtatccccttgctttcggtatgctgcttgatgttctaagaggaagcgccgcattctgggccaattttcaaaatgtgaatgtaagtcattcgtgtgtaaaatatgaattgtttccattttgcttactcccttcagctagtcgtggctggggtttgccagcgcggcttgtttgcgttcaaaaatgatttcaatctcatttgccgcaaggggtgttccaaacggcacccgttcaggtaataattcgcgctctggtgcatcaatcccgacattgatattctctgcaatcggcaacatataatgatgaatatgtccgtgcaagttgaacgtctgttggacctttcccaataataacggatagtgggttaaaaaatactgatggtgattgatcttaattagctcaccgacatcagcaaattgataatgcgccttgccagctgataatcccgcatcatgtttcgccaaatatttcaaaaaagcacggttatcatgattacctttaataataatcagctgcccattcaactgctctaacacagcagcgacttcagcaaaagcactcggcttattgggcaccattgcgacgtcacccaacaaataaacctggtcgtcagcttgcacccgttgattccagttagcaataatcgttgcattcatcgtagctacatctttaaacggacgcggcgcaaaatcattattacctaataattcggcgtgaaaaaaatgcgtatccgctgtgaaataagtcattcacaatcccacctaaccaatatgatttgcttttaaaatctcctgaaaggcttgcgcaactgcgccgtcttctttttcccattcttcccagtggtcaaaatcaaccgcaggcattgtgtaacgttcattaatgtaagcttcgtaagtttggaccgcattcgaatgcggaatgttgagttgtaaaatccggacttgcttaataaatccccggttagccgctagttcggcacgcccattcataaagatgttagccaattcataatacgttgtgccatctaagcgcgtaatttcttcaataatatcaaatgtttggtacttctccgccattgtgttacttcctattctaatccgatttcagttacgtttattctaccaatatgtacacaaaaaaaccactacccgcagatagtggttggcataagagagaaagagaattgataaaaaggtaattgcataagtaccttacaaacataatataccgcctaatgtaagcgttgtcaattgttatttttaatttatttatccgtttctttaaagttctgtaacaatcgtaggcatttgaaaggaataatggtatcttaaaaagagtagtttttatcaattgaggaggccattgatttgtcacagcaacattcacgatgggggcttttagtattaacaagcctttgtttctggtttttaaccggttttaccgttgtcgctcatcgtggcgaccccatcaacgcacccgaagaaacatttcaaagtattgacatggccttttcgcaaggcgctaactatgtcgaactcgatttacacgaatctcaagatggcgtcttagtcatctcccacgaccgtaacttacaacgcgtcacggggaccgatgcgattgtttcgcaaaatacttttgccaagctcagtgaactcaaaatgagtaacggggaaccaccacacagcgtcgatcaattatttgagcactatcaaaacaacccaaatgcgaaattcctcatcgaaaccaagaaaaccaaaaagggaaatccgcaggacatggaagcaaaactcgtggcgctgattcaacaatatcacatgcaagaccgcgttatggtccattccttttccctcgctagtctgcaaaacatgcaacgtttaatgccagagattccccgcatttttatcgttggcagtttacagcggatctcattcgagagttttaaatacgccgacgggattaacatctcatcatccctcgtcaccccaaccatcattaaacagctccattatctccatcaaaaagtgtatgtctggaatgagatgtctgaaaaccaagcgacttggaactggttagtcaacctaaatgtcgacggcgtggtcacgaactatccggcactgggacgccactatcaggccgcacaggatcaagcagaaagtgaagccatcgacacaattgggcaagtcaatgacgttcaagacctccccaccgttgaaaatccatatgaaccaaccctcaataaaaagccggctaaagcgggccatatctacaacatcaccgaagccgttacaattgccgatcaaacttactaccgcattggcactaaccgctttgtcctcagcgacagcatcaacgtcggtgaaacagcgaaagccgctgctttattggtgggtaaaacggcgcagattaaaccaactgcgaacattgtcgctacttggaataatccgctacaccccacccagacaaccggttatcttagtgccaattcacaacagcaaattttaggagtgcgctatgttggtaatcaagtctggttgaaagtcgctagtggttggttcaagagtcgccaagcattaatcgacttcaacccaaaccaatcgctgatggtaacccacttttaccgtgaaattccccaacaattgcggccaaccaacttactgattaacccagcactgccactgcaattgccccaacaaccaccagtcgacacacaactgtttaaccagtttgcccgttctctacaactaactaccattaaattctaacgaggtcaccttttatgacatccgattatgaacaattgattcgttccgtccaaaatactcttccaaaggaagaaacacttgatcacatctcaattctttttaaaatactaggcgataaaacacgcgctaaaatcttgtacgccctctttcaatccgaattgcgggtgagcgatattgtcagtgtgttagagatgtcgcaatcctcaatttcacatcaattacgtgcactcaagcaagcgaaactggtaaaaagtcgtaaagaaggcaaggaagttttctattcattagctgacaaccatgtcatcaatatcttttcgcaagttatcgcccacgtcaacgaacactaaggatcctattgacaccgatcaaattcactttggtcggtgctttttttaatgtcccaaacccatcatctcgattgcattctatcgtgtttggtggtatcttatagtcaacatatgaatatatgctcatatgtttgtttatttagtaaagattacgatttagcttttcactcaacaaggaggcctaaataacatggcacaacttcaattaaccggcatcgattgtgccgcatgtgctactaaaattgaaaagaacgttaacaagatggccaacgttaaaagttgctccgtcaatttcaccactcaaaaattaaactatgaactgaccggccaagaagctgttacggaattcgaacaacaactcgctactcttttgccaaccattgaaccagatgtggggattcaacaatcaccaaccccagaaccatcccccgcaaaacatgcgattaattatgatctcatccgaattctcgtcagctctttaggcttggcgatttcttatcttgtccctctaagcgcgccagctaaaaccacgttgctcctagctgcctttgtagtcatcggctacgatatcgtctggaccgcaatcaaaaatattctccacggcgaatggttcgatgagcatttcttaatgtcaattgcaaccattggggcctttggaatcggacaatatgccgaagccgttggtgtcatgttattctatcaagttggtgaatatttccaatcattagcggttaatcattcccggcgctcaattgctaacttagtggcaattaaaccaaccatcgccaatcggttagcggctgatggcaccaccgaagttgttgcacccgaagcaattcaggttggcgaacacatcgtggtgaaaccaggggaaaaagtcccgctcgacggtgtgattactaccggcgacagttacgtggacacctcagctattaccggtgaatctgttcctcgcgcctttcatcctggtgatgaactactcagtgggacgattaaccaatcaggtttattaacgcttgaagtcacgaaaccttatgctgattcaaccatcgctaagattttagaccttgtcgaaaatgcaagcagtcaaaaagcgcctactgaaaacttcatcacgcggtttgccaaagtctacacaccaattgttgtcggcattgcagccatcatggccattgtaccgccccttttattcggtgctccatttggcgattggctctatcgggcattgattttcttagtgatttcttgtccatgtgccctcgtcatttcaattccactcggctttttcgctgggattggaacggcttctaaaaacggcatcctggttaaagggagtaattatctcgaagctttaaacgatgtccaaaccgttgttttcgacaagactgggacattgacccaaggtagtttcagcgtcaccaccgttcattcggtcgatcaacaacctgatgaacttttagcactagctgcccttgtcgaacaacactcgacccatccaattggtcaatcgattttagcagctaaccaaacgccactcacaaagacgttatctgacgtccaagaaaccgctggtcacgggattagcgggcaactcaacggacaacttttacaagctggtaaggctagttggttacaagccagtggcatcgcaacactcacacctagtgaagtgggcaccagtgtccatgttgcttacaacaaccgctacttggggtatatcgtcattgcggacaccgtcaaaccagatgcacaaacggctgtcgcgcagctaaaacacgccgggattcatcaaacaattatgttgactggcgataaccaacccgttgcgcaacaagtcagcgccgtcttaggtatcgataagtatcaaagcgaacttctgccgcaagataaagtggccgccgtcgccaaacttacagaagaccgcgctaccaacggaaaaatcgtctttgttggtgacggaatcaacgacacacccgttttagcccgtgccgacgtgggcgttgctatgggcgggttaggttctgacgccgctattgaagctgccgatatcgtcttgatgtccgatgaaccgacaaaattagcaactgcgatttcgatcgccaagtacacccgccgcatcgtttggcaaaacatcattttcgcattagtggtcaaaggcatcttcttattattaggcgcctttggaattgccacaatgtgggaagccgttttcgccgatgtcggggtaacgttaatcgcgattttaaacgcacttcggattttaaagaagcactaaccttaaagggttcatggagactttgtgaaccttttattttttaatggcaagcgctttttaaatttgtaataatatgctaaaatgtgaatagattaataattaattaaccgttttttggttaaaatttaacaatgaaagctgggactgcaatgacattgaattggcaacaagaagcagcaaagtataaggatcaaatgcttgctgacttaacaagtttactcaagattaatagtgcgcgcgacgttgaccataaagaagacgacgcaccacttggccctggcccccgcgatgccttgctacaattcttagcaatcgctgaccgcgacggttttacaacaaagaatgttgaaaacgttgcaggtcgcattgaactcggtagtggcgacgaaatattcgggattttaggtcatatggacgttgtgcctgccggtgacggttgggaaacaaacccatttgaaccagtgatcaaagacggtaagatttatgcccgcggttcatcagatgataaggggccttcaatcgcagcatattatgctttgaaattattaaaagacaacggtatcgaattaaacaaaaaagtgcactttatcgttgggactgacgaagaaagtgaatgggttgggatcaaccgttacctcgaagttgaaccaaaacctgactttgcaatttcgccagatgcaaacttcccaatcatcaatggtgaaaaagggattgtgtcatacctcatgactttcaaaccagttgacggtgctgatggcgatatgacattggttagcttcaaatctggtttacgcgccaacatggtgccacaaacagctaaagccatcttaacgggtgcaatgccagctgatttccaagctaagtttgacgcctatgttgccgaccacaagttacaagggacaatcacaactgacggtgaccaaacaatcatcgacttaatcggtaaaggttcacatgctcaagaaccaaaagccggcgtaaatgctgcaacacacttggcaactttcttagctgactttgccttagatactaaaggtggcaactacatcggaacaattgcccgcttaatgcacgaagattcacgtgggcacctcttaaacatcaaccacacagatgatgtgatgggcgacttaacagcatgtcctgcagtcttcaactacacacaagatggtgtagcaacagtgctcttgaacgtccgttatcctaaaggtgtgactgctgaaagcacacgcgacggtttagcaaacacacttagtgatcttgctgacgtaacaattgacggtcatgcacaagaaccacattacgtgcctggtgacgatccattggttgcaacattattaagcgtcttcgaagaacaaactggtcttaaaggtcacgaacaagttatcggtggtggcacatatggtcgtatcttagaacgtggtgttgctttcggtgccttaccagaagaacgcgaaaatgtgatgcatcaagcaaatgaatatatgcacattgaagatatcatgaatgccattgcaatctatgcagatgcaatttacagattaacaaggtagagtgtgacgtaagtcgggtatccaccgaggattaatacaaagttgtgaatgattgcgtagcaatcgtttgcggctcagggttaaccggaaggatatggctgatagaacacatttagcaatcaaaaaaacggtccaaagcttaatcgctttggaccgtttttttgattgccttcatttatcagcaggcatcagcttaaacgttgaatgcccatctttgacaattgcgtataagatttgttgctttgtttcatcgaagtaaccgagattaacagccatttcgtcatcaatctcttcaattccctcaaaatgttcccgaattatcgaacgaacaaccttcatgttatccatgtgtttttgaattttctgtacagcaacccctagcgtgtagccttcatctaagaaatgcttgataaagatcgccttaatcattgtttgcgcgtcgtactcgcgggccttattgccatccaattcacgcgctttaatgtatcctttttgctcccagtagcggagttgacgcggtgtaacccccgccattttacaaacttcactaatcccaaaaatcaatcgatccgtatctattaactttaaaaaaaggtctttttgcaagtccccactccattcctattattatttttcattatagataatctattgggattgtcaagttaaataacacatttgtcaacttacttgacaaagataccaaatgcgtctaaactaataaatcgcatcaacaaaaacacacaaaggagatttttatcttgtcagacgctagaccattagatattcatgggaaaccatataatcggacagtcttagtcttggtcttattgattggtactttctgtaccgtcttgaaccagacgattttatcaactgctttccccacattaatgaaagcattcgatgtgtccacctcagccgttcaatggctcacaaccggtttcttactagtcaacgggattatgatccccattagtgcttggttaattaaccgattcaattcaaaagtcctctacatgtcagcaatgactgtcttcttaatcgggactattatctgttacatcgcaccaacgagctcgtttgcaactctattaatcggccggcttgttcaagctgctggtgttgggatttcaatgcccattttgcaaaccattatgctcaccatcttcccacctgaaaaacggggaacagccatggggatggccgggattgttatcggcctggcacctgctttagggcctaccctttcaggctggattatcgattcatacaactggcgtgttttattcggcatgattattccaatcgtgattctcgtcttagtcctcgctagtttccaaatgaagagtgttattcaactttcaaaacctaaaattgatgtcccttcaattattttatcaactgtcggcttcgggagcttgctttatggcttctcagaagttggcgataaaggctggggcgatgcgctcgttctcacaaccttagcaattggcgttgtggtaattgctttattcatctggcgccaactcacgatggaaaacccattcttggaactccgcgttttcaaatcacctgtcttcacaattgctgctattttaagtggtgtgacgaacatggcgatggtcggtgccgaaatggtcttgccactatacattcaaaacattcgtggcgaatctgccttccattcaggcttaacgttattagctggttccctcatgatggggattatgatgccaattacgggccgtatttttgataaatatggtgccaaacgcttagcaatgaccgggatgttcttattgatggctgcaactgcgccattcatcttcctaacagctactaccccaatcatctacatcgttgtgttatacgctgtccggatgtttgggatttcaatggtgatgatgcctgtcacaacttccggaatgaacgctttaccaatgaacttgattagtcatgggacagctgttaataatactttccgccaagttgccagctcaatcgggacagccatcttaatcagtgtgctttctagtgttacaaaaggcaatatgccaagcacacacatggtcaagacattaccattggccttccgcgataagatgattgatgccaccctttctggttatcacgcagccttcatcgttgctgtgattttctgtgtgattggcttcatcatcacattcttcctctcttcaaagaaatctacgattaatgggggtgccaaggcatgatcgtcattacactcgttatcagcacactcgcattattcttttcatcgattttcggtcaaaagatgtggcgaccaatcttaatgaccatctttggactcacatttatcgcttcactcgttttcatcgtccaaaatgatcacaatcattacggaatgaaaactgtgaccgaaactaagacgcacacgctcgtttcaagcgcagacgcgaagggcatgtcaatgcttctctatcacccacttggtaacggcactgaaaaagtctatctttatcggaccgatgccaaccaaagtaaacccaaagcaacccaaactgaaaagacaaccaacagtgttcaaaaaaatgctgataaagcagtcttagtgacaaccaccaaataccgcgtttatcaaaataatacggctaaattctggttcggaatttctggtaacgaccacgaattcgtaagtcgtcacaacacatttaaggttgctaaaggctggttcgttctaagtgatgttcaagctaaacaactcgctaaaacattaaaaggtcaacaagaacaacttaaaactggcgcagaaaatgccggtaaacaagctgtgatggctgctatgcaagccaatccagcaatgactgctgatcaacaacaagcggttgctaaaaaagcagcaatcgcctatcaacaagccgcaatggctaaagtgatggcaacattgaaataatgcaatcaaaaaatcccccacatcgtgatttgatgtaggggatttttttgtggtggaaatgtgctccgtcatccatatccttgcggttaaccctgaatgtcaaacgattgctgacgcaatcattcgccatcctgtgttaatcctcgggatatacccggctggctacgcactctgttttgaaacgggctttttgaaacatcttcctgcgcttaaccaaatttggcaaatcgacgatttcatcgtcaattcgtcaaatccagttaatgctcagaagatacccgtttcaaacgcactcttattttgaaacgggctccatcaggcatactcttccggttagttacatatcgaaaacgatcggctttgccgctcattcacgatatgccactaatcctcagagcataaccgcctgctgtcgcactctatttgcttaacaagcttgctgctgcttcgtctacgatgattgtcacgtcgtcgtgtagttgtaatgcacttgctgggacgtctgttgtttgtgggccttctactgtgcctttgatggcttcagcttttgatttgccatatgcgaacaagacgattttcttagcttttaagattgagccaatccccattgagattgcttttgttggtacatctgcttcattttcgaagaaacgtgcgttagctttgattgttgattctgttaattgcacttcttgtgtattgctgtcaaacgcagtaccgggttcattgaagccgatgtgaccgttttggccgatccctaagatttggatatcaactgggttatcagcaatcacttggtcatagcgttttaattcagcagaaatgtcgcttgctaagccgtttggtaagtatgatttagtaaatggtttcttgtcgaataagttcttcttcatgaaatagtggtaactttggtcgtcatcagctgataagccaacatattcgtccaagttcacggatgtgcaacctgtgaaatctaagtcgctagccactaatgtttcgtagaatttaattggtgaactaccagttgccaaaccgaatactttagcgttgtttgctaaaccttctttgaagatttcaaagcttttttggccgccttctacttgatctttcactttaataattttcatcatgattatctcctcatcatttaaaaattcaagtcgttcattggtatagtccaattataaacggctaaaatttcaattgcaagccttttgacgctaaaaaacgcgctaaataattggtatacctaacgtttagcgttttcacggcatttcgttaaaagcttacttttaatcgctagcaaacgcccccctttttgtgtctgctgattcaaatttgttaaccaattgcactatattcattgattgccgtgcatttctggatatttttcatttgtcttacaaatccgaaatcgggtatgataatgcgctgaactattatataatatgggacagtatgagaaaaaaggtggcgttattatttgaatgatccaaagcaccgttccagtcgatggcgagcactgctccagtcgagcagacaaaaggtctcaacgctattgacatctgctaaagacagactcgcacatttgctccatttacccgataaacgttctgcacaaccaactaaggaacaaaaaagagcctacatccaagagttgagccaatcaccactctcttttaagattaacgtcttctttgaagccattaagagtatctttctctatgggatctcaattagcttaatctgtatggcgctcgctgctggaattggcgcgggctattttgctgcgttaatgaaatccgaaccaattcctagttatcaagtgctaaagcaacaacttgataataccgatcaagcagccggtttatactttgccaagaacaataagttcggcgcaatcaaaaccgacttaattcggactcccatcaacatccatgagatgtccccttatctaaaggatgcgattgttgcaaccgaagatgaggatttctataaacacgatggggttgtccccaaagcactcttgcgggccgttatttccgatgtcactgggtttggttcacaaaccggtggctcgactttaacgcaacaattgattaagatgcaggttttaacctcccaagtaacctttaaacggaaagcaaccgaagtcttgctcgccttgcgggtcgataagtatttcactaaaaaagaaatcttacaagactacttaaacgttgccactcttggccgtaacaataaaggacaaaatatcgctggtgttcaagaagcagcattgggcctattcggcaaaaatgctaaggatctttctctagccgaggctgcctacattgctggtctgccacagagtccttccgtctatacaccatatgatcaagacggcacccttaaagatcctgaatacttaaaatatggtctagatcgtaaaaataccgtgttattccggatgtatcgtgacgatcgcattacaaaggctgaatacaaagccgctaagaaagtcgacttaaccaaagaattccaaccaaaagccgatccagccgaaacaacgaagagttatggctatgtttataacttacttgaaacacaagcaactgatattatggccaaacagttagccaaagaagccaatgtttcaactgccaaacttaacaaagatccaaatctctacaaacaatatgaaacacaagcaactgaattactcagcactaaaggctatcaaattcacagtactatcgatcaagaaatttacgatgccatgcaaggggttgttcaccaacagggcgcaacattcggacggacttataccgataccgttactgacgaagaaacggggttacaaaagaccgtttcgtcccctgttcaaaacgggagcgtcttgttagataaccgcactgggaaagtgatttcttttgtcggcggacgtgatttctcactcaaacaaacaaactacatgttgaccaaacgttctcctggttcaactatcaagccattgttagtctatggtccagcaatcgatcagaaactgattggttctaaaacgatgttggccgatttcaagaccaacttcaaggattacgcaccaaccgattacggtggcacgatccagaacaaattcattccagctgacgaagcgttagcccagtcattgaatattccaaccgttaacctttataacgctttgaagaacacaacagatccttctaagtacatgagtaagatgggcatcaacctcaccgctgatgaatacagtcaactggggatttcacttggtgggaccagtgatggggtcagcgtcttagaacaggccagtgcattttcaaccttcgcggatcaaggtgaacataccgacgcctacgtgattgaaaagattacggatcccgccggtaatgtcgtttaccaacatcacgctaagaagaaacgcgtcttttcaaaagcaacgtcgtacatcatgaaccaaatgttagccggcgttttaacagatgggactgctacttcaatttacgatcaactctactttaataccaacaacttagttgggaaaaccgggacttcaaatgataaccgcgatatctggtttatcgggagtacccctgggatcaccctcgcttcatggatgggttatgacagtactggtcgtaacttaactgacaactcaagccagattaatgaaagatactggtcaaaattggccaacagcgtttatcagatcaacccaagcctcatgcgtttggaagatgatcatgaaaagccaagtacggtcacaagcagcaaagtcttgaaattaactggtcaattacctggcacggtttcaatcaacggcagctcacagaacttgaacggttcaaccgtcacctcgctttataacaactggacgccaaaagcaactagctatgaattcgggattggcggttctgcccggaactacgaaactttctggaaccactatttaggttataacaacggctatggttcaattacctatagcaccgctgatgaattaaatccaactagtggctacagtagtcgtcgcagtggcaccgcagcaacaacgacaaataattacacagcaaacacaactggtactgctgctacgactggcactacaaccggtacgaattatacagcgaataccaatccaacagatacagagacaacgaactaaactaaaaaaaggcctcagttctaacgatttaaaatcgtttggaactgaggccttttttgattggtggaaacgtgctcttgtttgcaacaacttccgcttaatctaaaaatcccgttaatcctaaaacctggattaacgggatttttttattaatgctcaattgctgaccgcaaccaatagcactctattttgttgattctcttgctacgatactgtatggcaataggattgtcttgtcgtttacgtcttctttgttcatcatctttgttaaaagccgcattgctacggcacccatatcatacaatggttgtgagattgacgtcatcttaggacgtaccatttcagttaacttcgtgttgttacttgtcacaacttcgaattcagctgggatttgaacgccggcatcaactgccccgttcaagacaccaactgccaattcgtcatcactgacaacagcagctgttgccccagttgctttgattttgctgaacaatgcttcaccagcactgtagctgtattctgtttcaaaaattaaactttcgtcataagcaatgcctgcttcattcaaggcatccttgtaaccgcataaacgatacttgctgttaattgggaatttcaagctaccacaaacgaacgccactttgtcatgaccatttttgattaacttcaaagttgcatctttaacagcggcaacgtaatcgatgttaacactacccacttgttcgtctggatcaattgaaccagctaacacgattggtgtctttgaacgtgagaattcagcgcggatttcgtctgaaatactgtggcccatgtagattaaaccgtcaacttgttttgccaataaggtattcaacacttgaacttccttttggttgttttcatctgagttagccaaaataatgttgtacttgtacattgtcgcaacatcgtcaatcccacgagcaagtgatgcaaaatagatgtcactaacgtcgggaatgatgaccccaaccgttgttgtcttcttgcttgctaatccacgggccaccgcatttggacggtagtcaagacggttaataacttcaagaaccttcttacgtgttgcgggtttcacattcgggttaccattgacaactcgtgagacagttgccattgaaacgtcggcttcgcgcgcaacgtcataaattgtaattgtttgtttttccatgattaaatgattcctttcatttgtaaaataaaatagattatattttcagcagttttcattttacttcttgattaatttaacagagatttaaagcaaatgcaagcggtttacactaattttcatgaaatttacatttttgttttcatttgtggtttacattaccgtttacattggttgtgatatactagtgatatcaattgtaaaggaagtgctttagatgaataatcaattagcccaattacaaaattggcttggtgagaataatatggatgtggcttacatcagtaatccaaccaacatcctctatttcactggtttcgaaagtgatcctgcagaacgggtcttagccctctttgtttttgcagatcaggacccattcctatttacaccacaattagaagttgaatctgctaaaaaagctggctggaaactcgacgtttacggctatctcgatcacgaagatccatacgcaatcatcgcagatcaaatcaagaaacggaatgcgaaccctacacgttgggcacttgaaaaagacgaccttcctgttcaacgttacgaagctattctaaagcaattcccagacgcaacattcccaggcgacgcttcacgtttcatggaaaacttaaaattaattaaaacacctgaagaaatcgctttaatggaagcagccggccgtgaagccgattatgctttcgaagttggtttcaatgccttaaaagcaggtaaaacagaacaagatatcgttgcagaaatcgaatacgcattaatgcgcaaaggcgttatgcatatgagttttgataccatcgtacaatcaggtatcaacgcagctaacccccatggtggccccgaagccaacattttaaccccagatgccctcgtgctctttgaccttgggacattgcataagggttacatgagtgatgcgacgcggaccgttgcttttggcaaacctgatgcgaaatcactcgaaatccacaaagtctgtcttgaagcaaacttaactgcccaagcagcaatcaaacccggtatcacagcggctgaattagataagattgcacgtgacgtcatcactaaagcgggctacggcgaatacttcatccaccgtctaggtcacggcattggaacttcagaacacgaattcccatcaatcatggaaggcaacgacatgattatcaagccaggcatgtgtttctcaatcgaaccaggaatctacatcccaggcgttgccggtgttcgaattgaagactgtgtccacgtaacagaaacaggatcagaagccttcacacacatgacaaaagaactacaaacattctaagagtgctgattcaaacgggttggctttgaggattaacttaaaaacgcggattatgacgcttttcgtcatgattcgcgtttttggttaaccggaaaaggcagtttgaaacagcacgtttcaataagagtgcccttaattgcggtcagcaactgagcactaattaaaaaaggcagacgaaatcacaaaatgatttcgcctgccttttgttttaaatttaattaacgtgtaatcatccgcatccacattatcaatcaatggtgacatgccacctgttgctaataaagtgaggcgatgcatcgctctcgaacagatcgtgtagagcaattgccgttgatcttcatgattgtagttggttgcactgacttgccagccgataatcgcatcgaattccaaccctttggctaagaaacttggaacgactaacgtacccgctgccaaacgttgattttcggaacgaattaaagtgacttttgtgccactggctttcaacttagctgttagttcttgggcttgcaccaatgtcttggtgataatcgccgtcgttaacttatctgcttcatttttagcgagttgcgcattcacatcagcgaccaattgatcttcgctttgacgcacaatcaagtttggcttgtcgccttcacggttgaaagcttcaattttttgaccgccctttaagagccctttggtaaagtcggtgacttgttcagttgaccgatatgaacgcgtcaattgaacgaccttcgtattttgcgcatcaaagagttgttgcacttgttgtaataggttcgtgctgttttctttggtgaaaatcgcttggttcaaatcaccgagtaacgtgaagcgcgccttagggaagtgcatcttcaagaaggccaattcgtatggtgtgtaatcttggatttcatcgataaagacaaagcgcatgtcgcgttcgccgtgcttaccggtcattaaatcataaagatgcaagtaaggtgtcacatctgataacgtcatttgtttggcctttaaattagcgacaaaatcagtcacatgatcattccagatttctggtgtcagatcaaattcagccaaatcaaccaattgcggcacaacccgcatgaagtggacgtattgtgcttgaatactcaagaagcgattgcgttgaattcctttttgaacgggtttgaaagccttcaaaacgatttgcttagcgatatatttactttccgcttcaccagtcttaaagtccttacccgccataatttcgcggagttcctcatcacttaagttttcagcgcgttctgtcacccagtcagccttcgtttcatggtcgactttgtggctcaaactgcgcaataaactttccttcgtcgcgtctagccggtttcctaagtgatagttttcgttgaaacggtaatagacgtcgctgattttttccttactaatcaagaccttcccgttcactttcaagtcacggaagcgcatatcacctttttcaagatgcgctgcgtaacgtttaactgctttatagaagactaggctttctttcaaacggctaatccgcgcatcagtttccgtgattggtgtttcgaattggtcaaataaactctgaacagcaaggttcggcaaacgccgtgcaacatattgatagtaagtcatttgaatcatgttttgttcgccaagttcaggcaacacgtcagcgatataatcgttgaacaattggttcggcgagaacatgatcacttgactggaatccaggttaccccgataccggtaaagtaggaaggcaatccgttgtaaaatcgcggatgttttcccagaaccagcggccccttgcacgaacaataagtccgcgtcagtgttccggatgatttgattttgttcccgttgaatggtcgtcacgatactcttcatttgtgtatcagacttttcgcccaatacttccagtaacatttggtcaccaattgtttcttgcgtatcaaataacgccttaatttggccatcttcaattaagaattgacgtttcaaagaaatattgacgtcttgcgggccgtcaggcgtttggtacgtaacttcaccagtcttcccttcatagtaaattgatgaaataggtgcccgccagtcataaatcaagaaatgatcttcgcgatcggtgaatgaccctagcccaatataaatggactcagactttggttcacccttttctttaaaatcaatccgcgcgaaataaggggttttttccattttttgtaaagtctcaagttgccgggaagattgttgccaagaattattccgttcttgcaacatttgccgttgttgttcgattgagactgccgtttcagtcattgctgaatcattattgaaattcaaccgtacatcattaaagaagtttgcgttaatttctttttcttctgatttagcccgttcaacggcgccttcgaagtgcttttcggcgtttttaattaaaccgacaatctcggttaaacggcgttgttctaatgatttttgttcgtcagtcaaagcagatgtcccccgatttctaaataaacagttctacaagtttaacactaaattcacaagagtgcgacgataggcgcttatattttgagcattaactggatttaccgaattggcgatgcaatcgtcggttcggtaaatttggttaagcgtagaaatatgcctatcggagcacgtttagagtgcgtttgaaacggtttaactttcgagcattagcctaatcagggaaataagcgatgtagtcgattgttttcctgatgtagctaagcggaaaaagttatttgctaaagcacgtttcacgatcttcctacaaaaaagccggccgctgcaaccaccagccctaacccgtaggttaatagcagataaccaaagaaaatatggtaacggcggcgaaaccacagctgactcaattcgctattgaacgttgagaaagtcgtgtagccacccaagaccccgacgcccaaaaagggcgtccacgtttgatccaattgtgccccggtcacccaacctaagcaaaagctccccgttaaattaattaaaaaggtgattaatggatattcgctggcaatctgcgttccaagacgggttaattgataccgcaaaatagcgccgattgccgcgcccaatccgacaattaataacgtcatcattttagcacctgcgactttccttgccgatcgagcagccaaactgcccagtaatctgccactaaacttaagcagacaccgccaatcaaactaatcccgatatacaggctaaatggccaccattgattggccaccaataacttcaatgcatccacgctaaaactagaaaaagtcgtgaaggctccgaaaaagcccgtgcccattgcaagtgccagcgtatcgctaatctgataacgaaccacgatgtaacgcattaaaaaaggaagacaaaacgccccgattaaattcacacacaaagtgccatacggaaaccccgctgcttggtgcaatccgagcccaattgcatagcgtaaaatcccgccaaaaaaggcaaaaattccaaccgcgagactttcttttatcttcattttagatcgcccccctttttaatatcgtagcatctattttacagaagttattaccaattgtaaattagttgtagatattaactagcgataatgccaactttttaataataatttaatcactaacgaattatcaacaaaatcgataatattagcgccaatatataaaaagccaattttacgaacccgtgctgttgctcggaagctattcggctttgacatgctttagtacccatctagctatcaaagccaacttcctgtgcacagctgtggcccgcaaacagtcggctacaccgcctatttacgaacccgtgctgttgctcggaagctattcggctttgacatgctttagtaggttagtgtatgctctacacaactttattgagcattgaaaggatcttttttatgacaagcttagcgctcgtaatcgttctattggcggctttaatgacgccgttactcatggcaaaatttaagatttcttatttaccaaccgccgttgcggaaattttggtcgggattttactcggacaaagtggcttccacctcatctcaaccacccccacactgacggaactttcatcattgggtgtgaccgtcttaattttcttaagcgggatggaaatcgactttgaactctttaaaaagcaacccaccacagctaaatctggcgttaaaacaccgctgacgcccttacaactggcagtcggtagttttacgctgatcctattaagttcgctaggactcgccagtttattggcatggagtgggttgttcaccgatattggactcgcaacaattctcttttcaaccatcgcgttaggggtcgtcatcgccgcgttgaaagaaaaagaactcctcagccagccgcttggccaaacaattctgttaattgccgtcctcggggaaatcgtcccgctgatttcgttaacaatttatgccgccctcaataatcctggttctaagagtctgtggttactatcactaattttcttagccgcgatcttcttattgatgcgttttaaaactgtttatcacttctttgagcggattgataagtcaacgactcaactcgatattcgtttagcctttttcttaatcatcacacttgtatcgattgccgaagaagtcggtgccgaaagtattttgggcgctttcttagccggcatggtcatgaaacttttacgcccccgtgaagagacgcaagataaattaacatcaatcggctacggctttttcattcccatcttcttcattatgaccggtgcaaaactcaacatccccgcgctcttacgtgatcctaaatcactgaccctgattccctttttcttcatcagtttcatgggcgccaaagttttgatttacttcgtcttaaaacggcgcttcaaagtcaccaacgccctcgccgggactttcctcagttcgacgaccatcacgttggtcttacccattttgacggtcggtctcaacttgaaggttatcacgacacagcaatccggcgctttcacaattgcagcggtgattagctgtattcttggtccgattctgttcaatcgattctacttaccaacgcctgaagagatgccacgcaaacgtgttaacttcatcggcgccaacatcatgacaattccaatcgcccaacagttatccaaaggtctgtacacaagcgaattatttaccaataacgaacaaaattatcaaatctaccatagccaagccaacctcgaactcttgcctgacttggcaccagccaccttaactgacgcggccgtcttcgatacagatatcctggtcttaggctatttaaataatgagcaaaattatcaacttgcccaacaagcgattcaggccaaagtaccgcggatcatcgcccgctttgaatttaagaatatctcggacgatcaatacgatgaacttaaagaacatggcgttgaaatttttaacacttacgaagcaaatatcagtctgttgcgaagtttaatcgagactccatctaccttacaaatcattgataacactgatgccgggctcttcgaagtcacggttaaaaatcggcgcttcaccgggattcaactttctaatctcccatttgtggaccaagtcacaattagtcgaatttaccgcgataagcaactgatcatgccgcatggtgacacgcaaatccatctcaatgatcacctcattctaacggggaataaacaggctgttcctgccattcgacgccaattagaaacgctcaactaaatcatgttgaccctcgcacattctctctaataggtttataatgaaactatcataattaaaggatggtgcagatatgaaacaaggaacaacaatcctcacattggataatggttaccatttatggactaatacgcaaggaacaggcgacattcatttactctgcttacacggtggccctggtggtaatcacgaatactgggaaaacttcggtaaggaattagctgatcttggtgtacaagtacacatgtacgaccaacttggttcattttattctgatcaacctgattactcacaaccaggcaatgaccaattattaacatatgattacttcttagatgaagttgaagaagtccgtcaaaaactgggcatcgacaacttctacttaatcggccaatcatggggtggcgcattggtccaaatgtacgctgctaaatatggccaacacttaaaaggtgccatcatctcgagtatggtcgatgaaattgacgaatatgtcacaaacatcaacaaaattcgtgaagacatcatgacccctgaacaattgaaattcatgcaagactgtgaagctaagaatgattacgacaacgatgaataccaagcacttgttgacaagttaaacgctggttacgttgatcgcaaacaaccacttgcaatctcacatttaatcccaacaatggcaaccgacgtttatggcgtcttccaaggtgataatgaattcgttgtgactgggaaattaaaggattggcatttccgtgaccaactccacaagattactgtcccaacgttaatcacatttggtgaacacgaaaccatgccaatcgcaaccgctaagatcatggctgaaaagattccccatgctcgcttagtgacaacgccaaatggtggtcaccatcacatgattgataacgcacccgtttacttcgatcacttgaagactttcatcaaagacgtagaaaatggcaactttaacgattaaataaaaaaagccgcgcacaaatttaaatttgtgcgcggctttttttgacctaatcaataatatctgaattaggttcccatttatccattgtatcgaataagtggtttgtttgtgcgaataattgagaaaggtctgcattgccgtcatctttaaaatgtttaaagaataagtagaaatcgacttccaattgatcaaccattcgtaatccttgctcattcaatgaaatgaatactttacgttggtccatttcatcactgcgatttttaacaattaagtgttttctgaataaaacattaattttacgtgaaattgctgggcctgaaagatcaaaggattccgataatttcgccacttcaatattggggtttaatttgacctctctgagaatcaaaaattgatcgtatgtcaagtcgtgcgtgacagttaaatgatttatcttattgtaaatttggccaatttgcagataccattcgttgaatcgatcaacaaggttactatccgtttctggttgcatcgaaccactcctttacataaacactaaatgtggttattaagtgttactagtcaaaaataacacaaaatgtataaaatcaaaaggtttatgcttaaaatattaataaatattgataaagttatttattagtatcttttaaaatttattctctattaatgataattgcaattgattataaatcaattgttattattaccattaaaaactataaatgtatgtaaccgttttgcaaaaaatatggaatgaccctgcacaccatttttatctatgctagaatgaaggtactaaaagctattgttggagggttacgatatgaaacgaatcacactttatttagtgcgtcacggtcaaacattctttaaccgttataaccggatgcaaggttggtcagactcaccacttactccgaaagggattgcagatgccgaacgcgctggcaaagaattagcgaaagttaattttgctcaagcttattctagtgaccgcagtcgcgcaatggacaccgctaaaattattctccataagaatttctaccttgatactccatatgctatcacaccgcacttccgcgaagaattctacggctattttgaaggtgaagattcacccaaagcgtggtccatggcaggtgccagtcatgatgccaaaaccttccaagaaatcatcaccaaatactcactcgatgcctctaaagatttcatgaaagaagctgatcccttccacgatgctgaagatgccgctgaatattgggcccgcgtcggtaaaggtttcaaacaacttcgtgctgaatgttctgacggtgataaagtcttgatggtcagtcatggcacaaccattcgcagtattgttggcaagtttggtaacgaccaattcgatgttaccgttagtccaatgaacggtagtattactaaagttattttaacagacgaaggcgttactgttgaaagttacaatcaattaacccttcaatagtatcaaaacgataattgatgtatgaatattcattgaatatagagctgggcaatattattctgattgttcagctttttttgtaggtaataattcatgccgttcaataataatacgcgcttcaaatgacagtttcggcagtcttctttggctttttttgtaggtaaaatgctcaccacaattgtagctaagcaagttaaaaactaatccagcgtggtatacgcctcttaatgacatcagtgtaacaagtagcgtctagagaaacaacttcgacctcatctaaaaaaagccccctttaatctcgaagttcagattaaagggggcttttttagactgattcctatgttttaaactgtttcaaccatctactatttaacttccttcaacacaattcctttgtagagccatgtagtgagcaagtagtagattgcgtagagaataatgaaaattgaaaatggaatccagagatcattatatggatcaatcataatcaatttgaacaattgaagaccaaagaggacatggatgacgccgacgatacctggtaagaggaataagaccccaatttctttggcaatggattgttgcaatagattgtgacgcgtcccgattttagccaacattgtgtagcgtttaacatcactagctgccccagataaaatcttgaacatcaagcaacttgctaacatcgctaagaatgcaatcccgaggaagaagcccataaattcgagcccactgaacatgctgttcgctagcttatagttagcatacttgctactatccattgtagccccttgacctttagccaattcaggatttgcaatcacttgttgtgcgtgaatttttttgataacgggtaaattaaccgcaaagtctttgacccgatatgttttaacttgcgtggttgcgcctgccacttgattaaattcagcgtcagagacgactttaacgtccttactagattgacttggcacttgaattgcgcgcaaggatgaagaatcgccgttttgaatctcactgagtttcaccggtttaaccccttttgcgcgggcgacaccattcccattaccaaactgaatggccatgattggtgacttttcaagttgtgctgtccgatagtagacagttttcgcatcttctttaacatcgtaattagcagtcgccttcacaccctttaaatcttttgtgaggcgcaatgcttcttggttcggttgatttaaaacaacgtcgtaaggcgccattgtttctgccatttctggaatttcactttgatagccaatcccaactgtgattgcgcctagtgccaatgcaaataacatcgccaccaatgcgagcatcttggtgtaatccttaatgcggaagctcaattgcgctaacgtaaaattatttaaaccacgattacgaatcttgctgttacgtttgagcaacgtaatcaaccagccgaaaagggcattaaacaagaagtacgtcccgagcacaattgtcactaatgccacaactaagcccataatttggaacgttgcgactttaatcatcatatagtaaccaacagctaagaaaagtaagcccaagacaatttgcacaatacggcttaatttattttgtgaaacgcgatttggttgttgatcatcgtgtaagagttgtaaaactggtgttttcaaaagttggaattgattaactaccgctgcaataatgaacaagataatgaagaaaatcaaagttactaacactgcaggtaagtaaaatggtgaaaaatgcttaatctgaatatccatttgagacaataacagattgctaacaatttgggttaatccgaccccgagcgccgttccaatgagagtagcagctgtcccaatcactaatgtttcagcagcaattagttgggcaattttgcggccttttgcgccgagcatcataaacatcccgtaatctcgacgccgcatgctcattaagaaattattcgcataaataatgtagactaatgtgataatccctaataaaacagacccgatttggaaaataatgcccgccatgctaattggcgagttactcgtaacgaaacttttgttagttgccagtgcttcgaacatgtaaaaaatggcacttgccataattagaccggaaaaaagcactaaatagtctttcaaacggcctttaatgccggttaatgataacttcaataacatatttagacttcctcctaatggttaaatgtgcctaatgtatctaaaatttcttgataaaaggcttcccgactcttatcgccgtgaacgagttcttggccgatttgaccatctttaataaacaagattcgttgacaataactagctgaaaatggatcatgcgttaccaataagattgaaacgcgttgttcttcgttcagctgagccattgtatccaataattccttggcactctttgaatcaagtgcacccgttggttcgtctccgaataaaatagctggattgtggactaaagcccgcgcagcggcgacccgttgtttttgaccacctgataattcggttggatatttgtttaataaactatcgattgataacgtcttggcgattgatgtgactaaatcgcggacttttttaccgccaacattttgtaacgtcaatggtaatgccatattttcataggccgttaagttttctaataagttgaagtcttggaacatgaacccaatttccttggcacgaaaatcagctaattcattccctttcaacccattaattgcttgcccgttaatttcaacttggccagcagtcggtttgtcaagggttgataaaatgttcaataaggtggttttccctgaaccagaagcccccatgatcccgacaaattcgccctgtttcacatcaaaagtaacgccttttaaggctgtgtattgtttttcgtttggtttaccgtatgtttttttaacgtctttgacgctaacgactgttggtgtgtccattaataatgcctccagattttatgataattctatcttacaagagattaaaacggcatgcgcgctttttagatgacattttaacgggctaaaataacaattttgtaagattattcccccgttctttaaaaatcaatgtgaaacagtcaaaaaagttttgtcttccctttctgatttgattataataaaaacattgtgaattttcagaaaaggggtttctttacgatggatgaaatagaaccaaaaaagaaatatattacctggcaagtccttgctttaatggattttgtgaccgtcattggatttgacgatattatttataactttcaaaaccaagggatggcagttgtcttctcatggattgtcttactattcgcctatgtcctcccttatgaattaatggttggtcacttaggctctgctttcagtaaagacggtggcggtctttccagttggatgcgccatacaagcggtgatgtttggggttacttaaccgcttggtgttactgggtagcgagtttgccatacttggtcgatgttgctaattcaatggtcgtttccttcttttggattattactgggaacggaaatcttgaagacaagctctcacgggcttcctttgcgcttttaacagccgcaattaccatcctcttcatcttcttccaacacaagtttacatcgtctctacaggtactcagtatcgttggtgggggggcgatgtttgtcatgaccatcctctttgtcctaatgacctttgttggtttattgaacggtggtcacgttgccacccatccattaaacgcacacaccttcattccaaaatttgatttacattacttctcaaccatcggcctcttaattttcgccatgaacggtgccgaacttgttgcaccatacgttggccaaatgaaagatggtaaaaaagattttccaaaagccatgatggccctcgctctaatgaccgccttcctaaccatcttcggctcattagcaatcggcgtcttcttcgatgccaaccacttaccagctgacttgaagatgaacggttcatactacgccttcttagcccttgggcaacaattccacatgggtaaagtcttactctacatcttcgctgttacccaagcgatttacatgggcgctcaattagcgatgctactcgatggcggcacacggattttcttatccgacactgccaaacaattcttaccaaaagcactgactaagaccaataaacaaggccttccaatcaacggttactggttgaccactgggatttgtgcctttgttttagcatctagtgcctttctgcccgagattaacgacatcttcaattggttgttaaatattaacggtatcgtctcaccatttgtaacttgtttcatctttgtcgccttcttacgggtccgtttcaatagtgaaaaattcccatcagaatacacatacattaaaaacaaaccatgggccatcatcgttggcttctggtgtttagccattacagcattaggaacgatcttcagtatcttcccacaagatgccacacctggcacagccaaatatacacatgaattaatcttaaacatcgtcgtctcagtcgccttaatgggcctcggcgtgattttaccactggttgcaaaattccaaagaaaacgagcagcctaactaaaaaagattcgcccatatggagcgaatctttttttattgccttggaaatgttaataaatcataaagccatctggttcaatgatggtcgctgctgtttgctgctgaaccccttcagacagaattggtgtcctcattgatgcaacactaacggctgtttgacctgcattaaaaacagccgtcaattgttgctcacctaatcgccgagtcatttttaagacgtcgggatgagtcggctcaattaaccactcaagctgtccttccgacaatagtttttgcttaccatggcgaagcccaattagctgcttaacgaactgatacatggcttgatcttggtccacgggatcccacaccatgcatttacgattagcaggatcgtccactcccgtcatgccatactcatctccataatagaggcatggcacacccggctgtagatacataaaagccatcgtttgacgcatcaagcgtcgattgtcattggccatcgttagcaaccgcggcgtatcgtgcgaatctaggatattaaactgcacctgattaatttgatcccggtacagcattaactgtcgattcagcttcgaaaccatttggtggagcggaatttttttatgaataaaataatccaaaatcgcatcagtgtaggcgtaattcatgactgcactaaactcgtcaccgctgagccaactctgcgctgaatgccaaatttcaccaagaatatagaaatcaggtttagcagcatcacacacctgtcggaactttttccaaaagtgatgatcaacttcattggcgacatctaaccgccaagcatcaatatcaaatgcttcgatccaataccgcgctatcgataacaaataagcttgcacctctggattagccgtatttaattttggcatgtgtggcgtcgtggcaaagacatcatatgtaatgtctgtagcatcttcgaaattccgacctggctgataacgcactggaaaatcccgaatatggaaccaatcagcataccttgaagccgcgccattttgaatcacatcttgccattgtggtgattgatcgccgagatggttgaagacagcatctagcatgaccttaatccctctttgatgacaagcagtaatcagctgccgtagcgtctcgtcattgccaaaatgtggatcaaccatccgataatcacgcgtatcatatttatgatttgaaggcgccatgaaaattggattgagatacaatccattaatccctaacgccaccaaatgatctaaatggtcaataaccccttgtaaatcaccgccatagaaatcttgagcctgtggtgcctcatttgtccacggtaatgttccatctggatcatttgtcggatcaccatttgcaaatcgttcaggaaaaacctgataccaaaccgtttgtttgacccactctggtaccttagcccgatcaatttcttggaaatagggcatccgaaaacaagcatctgttttaggtaagattggaccaggcccctgatcaccataaaaagtgctggtcccgtccacaccaatcacttgaaaagcataggctaatcggcggcgatcaatggtcagttcaatcgtccaaaaacaagcgagatccgttattaagccttgctgcatccgaatcgttttcggttgccaactgccatcgactaatatataaggatccccatacactaggtacactgcttcaacgtcattacttgccgtccgcaatcgtacccgtagcctatctggctgatataagaaagcaaactcactatctggtcgatgataaatcgctgctaaatccatttgtctcctccttaaaaaaaccagtccaacacacacccgaaggctcggttgcactgattaattagtgttgatactgttcaaaggcttgttctaacaaatcagccgttaacgccgccgttgtagggacaacaaccgccgctgctgataattcgctcgcatgaccaatcgcaaccgaaacagcgcctgcagcattaatggcggccacaccagctactgaatcttctaatccaacgcattttcgcggattaacagcaatcttctgagcagctgcgatgaagatatccggggctggtttaccttggtgcacgtcattcggattaacaatcgctgtaaaatatgctgataaagctaatcgatcaagaatgagtggcgcatttttgctagcagaagcaatgaccattggcaccccgcgcgcttttaatgctactaacaacggttgaatacccggtaaaatatcggcagccgttaattgcttgatagcagccacgtaattttcatttttttgagtcgccagtgctgcgagttgtgccaccgtatactggccatcaagttgggcaaaggccacaattcgttgcaaggatgcttcccgactaatcccttttaactcagcttcaaagctatctggtaagctgacgccaaacgcttgttgcgccaattgacgccacgccgcaaaatgaaatcgggctgtatccgtaataaccccatctaaatcgaataagacaccgtccataataacctcctattccaacatcatcgacgcatcattgacttgaattgccaaacgatcgcccttgagtagtttgatatcagttcggtcggccgtcacgctaattttcaacaaccggccgcggaagttaatatggaattcataagccgtccattttttgggtagaaatggtttgaatgataattgtccttcatcgctaattcgcatgcctgcaaaaccttgcacaatcgctaaccaactccccgtcatcgacgtaatgtgcaatccgtcatcggtatcattattgtaattatcgagatccaggcgtgccgtccgcgcgtacatttccaccgctttatcttcgtaatgcagatcagccgctagaatcgcatggaccgccgctgataaacttgattcatgaaccgtcaacgtttcatagaaatcaaaattacgcttcttttcagcagctgaaaaacgatccataaaataccaaatgccttgtagaacatcggcttgtttaatgtacggcgaacgcaaaatcttatcccatgaccaatgttggttgatgggccgttgatctgctgggattgcactgacaggctggatatctttatctaaaaagccatcttgttgaagaaagatcccgagttgttcatcttgtggcaggtacattttttcaataatcgcttgccattgtgagagttcttcatctgaaagtctcagatccgcttttttggtatcgcttacttttttgagcgtttcaatcgtataactaagcgtccattgcgccaataaattcgtataccagttattgttaatattgttttcatattcattaggccctgtcacaccgtggatcatataccgctgcgcacgttgtgagaaatggacacggtctgcccaaaagcgtgcaatctcagttaacacttcgataccttcattgagcaaataagtctcatcgccggtgtaacgtgtgtagttataaattgcataggcgattgtgccattgcgatggatttcttcaaatgtaatttcccattcattatggttctcaatcccattaaaggtcaccattggatagagcgcgccttttaacccctgttgccgggcattgtgttctgcacccgacaattgattatgccgatacttcaatagattcaacgacactttcggatcagccaatgagagataaagcggcattgcaaaaccttccgtgtcccagtaagttgcaccaccgtatttttcgccagtgaatcctttaggaccgatatttagacgctcatcttcaccataaaaggttgaaaaaagttgaaataaattaaagcgaatcccctgttgggcactatcatcaccgacaatcaccacgtccgccatctgccaccgtttcgcccattgattcgtctgtgccgctaataattgctggtaactttgttgcgcaacgacctgcttgatacgttgcatatttggtaccaagtccaactctgaataatctcgagaagtcaccactaccgctcgtttttcaaaattcaattgcgttttaggggccaattgctgtttaaaacgttgcccaacttggtgggcttcttgaagcccagtatctgccatcattgtcgtttgatgatcaatttgaacccccacactaaaccgtggtaccccgaaatcgttgggcattgtttttccgaccaaataagtgtcatccgcagcgtctgactgctcaatcacttgccagaattgctcaccgtaattcgcatcctcattttgaacatcagcatcgatcatagaactaatctcaatctcaactgcttcgctcgccaagttttcaacagtgtagcgcaatgcgcataattccttttgaacgatactaacaaaccgctctatcgtaacttgcacttgtttattatttttagtaacgatgaattggcgggttaacaccccattatgcatgtcgagtgccaatttaaatgcggtcacttcatctttgcctaaatccaccgcttgaccatcaattttaagattcgttttgatgaaattgatggcattgatcactttcccaaaatagtcaggataaccatttttccaccagccaacgacggttttatccggataccagacaccaccgagataaatgccaggcaggctgtctcctgaataatcctcttcgaatacgccgcgcatccccatgtaaccattaccgatactcgtcatactctcttgtagccgtttatgtttacgatctagttgatgcgtgacaatctgccacggatcgacttcaaaaattctctccatttcgttccctccgatacgtcagccaaaattattccgcctatttagcagcgcttaatagattgtttcttccgttgcgatgtcgaagtagtgcgctttagacatttcaagcgccatctcaacccgatcaccaggttcatgataatcccgcgaattaacttcagcgataaaatcggtttgtccaatctttgagtagagcattgtgttagcccctaataactcggaaacgacaacctctgccgttattttagcatctgggaatgtttggagggcaatttcttcagcgtgaatatcttccggccgaatccccaagatcacttgttgaccatcgtaaccaccggcaataagctgtttcaactgaccttctggcactgcgatatttagaccatcgtcattcactagatgcccattagttaaggttaccgtgaagaaattcgttgctggtgaaccgataaagcctgccacaaacttattaaccggatgattatagagttcagttggcttgccgacttgctggattttaccatcgttcatgatgacaatccgatcagccatcgtcatcgcttcaacttgatcatgcgtcacatagatgaaattacgacctaaacgttgatgtaattgcgcaatttcagtccgcatttgcacccgtaacttggcatccaagttcgataatggttcatccaataagaacaacttagcatcacgaacaattgctcgtcctaaagctactcgttgccgttgcccaccagaaagagaagatggcttccgatctaaatactccgataaacctaagatttctgctgcggcatcaacccgttttttggtatcttgcttatcattcttacgaatattaaggccaaacgccatgttatcgaagactgtcatatggggatagagcgcatagttttggaaaaccatcgagatatctcgatccttaggtgcaaccttgttcatcactcggtcgcccattttaaattccccatcagagatatcttctaaacctgcaatcattcgtaaagttgtcgatttaccacagcctgatggtccaacaaatacgatgaattcaccgtctgcaattttcaaattgaaatctgtgacagaattggtatcatttcctgaatattttttattgatatgatttaaattaatttcgaccatcgatcatttctcccttacttcgtttttaactggtgcaccgttcaataattgatagctaatgaaggctgccaacgaaacgctcgcaacaagaatcataaacgcgagttttaaaaagacattaatgcccatcaacaagatgaaaacgccggtggctagcactaatttgcccccattggcaatgataaagccgcctaaggtaacatcatggcgcgctaacccgaccaagtagcttctggcaacgacaactagcaataacgccccaaaccagaccaataagccgctacgaactaaaatatcgcctacactggcttttagtaacaacacgatgatcatcaatgccgtcgctaacgtcagattcactaaaaagtctggcagtgcctgccgccacccttttaacacaacgcgtgcataattaccatcaccgttaacttgccattggtccaccgctctaaaaaccgcgactaaacttggtagtgtaaacaaactgagcattaacactagcacaactgcacccggaatcattactcggccgtttggcatactaaacattaaaatcagtgtcagaatgacaggaaaattaattccaaaccaagcaaggttgatggtaaaaagcgaccataaccaattcccggctgccaataacgtttgtcttgtttcgctgtgctttttcacgattaacacttccttaattatttaacggcgccatctgtaacacctttgataatccatttttgagcgaataagtagaagacaatgaccggaataatcgacaaggtaatgccggctaatgcgaggtgccattgtttcgtgtattctccgaagaaattaaacatttgtagtggaatcgtatattgcgcttgtggtaagaccaatgatggtaaaagataatcgttccagatcgcaatgatgttcaaaatagcgaccgtcacagtcattggactcaacattggtaagatgatcttgtaataaatttgccaccgactggcaccttccatttcagccgcctcatccattgcaatcggaatacttgaaagggtgccttgatataggaaaatcgataaactacagttgaagcctaaatacatgaacatcaagccgtacatattcaacagatgcacattaccgaagtttgccgtcaacggaatcataactgattggaatggaatcaacatcgctgagatgaaaagcagcaataaactactactcaacttcgatttattccgttgcagtgcataggctgccattgaagaacagaggataatcagcaacacactgcagactgtaataatgagcgaattggtcaatgaactaatgaaattcaatgctttaaacgaatctccatagttcacattcgtgaatggattaggcagcgacaatactgaggcaaaaatgccttttggtgttttaaatgagttcgttagaatcatatagaatgggaataaccataaaagaccaatcaatacaccgaggacgccgatccaactatttcttttcttattcattagaaatcgccctcccgtttacggttataaaagacttgtactaaagaaatcgcagcgacaatcaagaagaagaccattgctttagcttcagcgagtgcgaaatcactcgaattataggctgtattcacaatatccatcgccaacatttgggtcgagttgtaaggtcccccgttggtcaacgacaagttttgatcgtagattttaaacccattcgacagagttaaaaacatacagacggtaaatgctggcgcgatcattgggaatgtaatccgcgtaaatcgttgccaagcagatgcaccatcaatttcagcagcttcaatcacttcacttggaatattttgcaagtaagcaatatagataatcatgatgtaaccactcatttgccaaaccgtcacaattaccaagccccaaaaaccggttagtgaattcgttaaccagttttggaaggcagtcatgtgtaaggcagatcccaaagcgctaaagccttgcgtgaaaatgaattgccagataaatcctaagattaacccaccaatcatgtttggcataaagaagatcgctcgtaagaaattgttgcctttaaatttctgtgtcacaagtaatgctaaccccaagccaattacatttagcaagatgacggtcacgataacaaaagctaccgtgaaccaaaaggcgtttccgaatgctttatcttgtaataaggccatgtagtttttaaacccaacgaccttagtaaaagagagtccatcccagtcagtgaatgaatagaataggccctccagcattggaatgaaaacgactaatgctaatgcaacaagggtaggggttaaaaataaccaaaatgataaactcttatttttcatttcaataccctctttttgttttatccaattgaataaatttatttagtttgttgttttgtccaaccgtccttcatatttgaaacagtcttttgccaatcttggtcacctgatagatatttttgtaggttaggttgggcaacgtctggatcccatgatgtgccagtataacccgggaaaacccagccgaatgttgctttcttttgactgtaatcatagaccgattgtgtgagtgcatctggcatcttcacatcaccgtaacctttataagcaggtacgaaatgtaatttctcaacaacgtcttttttaccttctttagacgtatatagccagttcaagaagtccttagctgctttttgttcgtcggtactcttccgtttattaactgcccagtagattgaggtcccaacaggcatcttaccttgttgttccttaactggcattggaatcatgccgatcccgtcttgagcgaatttcgcatcaatttggttaacggtttcgtaaatccagtcgccttgttgaatcatcgcaacttttccttgagcaaagttttggttcacttgtcccgcgtaatccatttgcatgactggttgaacggaatattctttttgcaaatcaatcatttgtttcatttctgcattgttttcaaacttcattttctttgaggtatacaacttttgtgaattgccatcaaattctttacttagataaacattcaacaaatgatctgaaagaacccatgattccttaccaggtaaagcaaagactcctttaatgcctaattgttctttttgttcatttaatgttttaacagctgcttctaatttatcgtaagtcgttaagctctttggatcgataccggctttttcgaagacagctttattataaacaaaaccatagccttcaatgttaaatggcaagccgtaaactttcccttgtgacttaacagtatctagtgtgcttggaatagcggccttagcagcttttgtatccgttaaatcagccgtgtagttcttgaattgtttaaccgatgctggcccatctaaactaaaaatagtaggtgcattcccggatgaaattctcgtcttcaaaacgggattatactgtgtcccaccaccgattgatgtgatttcaatcttgacgtttggatgtgctttttcatacttcttcgcaatcgctttgaattgcttgttggattccacttttccttgtagaattgtgattttcacattgccgccatccgcactcttgctcccacaagcagccaatgttaacgttacaccagccaataacgaaactaaccctagctttttccacatctttttcactataacgacctccaataaatttttatcagtgctgtttacaagttttattgtcgtactttgaaagcgcttttgcaaatgttttcctgatgttaccggtaacagttttcttatgcttattccgattgttcttttagcacggggcgaattgtcccgcccatttcaatgtttggttcgaatatcaatggtcgctcaatccactcctgattaattttcttgaggatattctctccgcatgcacggcccatttcaatgatggactgcttaatcgttgtcaacttaggagaggcaacttgatttaaaaagaccccatcaaatcctgtaatcccaaactcttgcggcacatgaccaccacacgacgcaatcccccgttcaatcccaattgccagacgatccgtggcacaaataaacgcagtctcgagtttgaattgcgcccagtgttcaatgatgtaggcttcggtcaaatgactatggttgttaaaatggtgtaactgaacaggacgctgctgctcatgcattaattgtaaataaccggcttcacgtgatttttcaaacgcttcttcactcgccattccaatataaataagctggcgataaccacgctctaatgctaattgcgctgcaaggtaggtccccaactggttatttgtatccacataatcaaaaccgtactgattctccccaaaaacgacgactggctttgtcagatcgcgaatccatgcaacatcactttcacgcaatcccgtaataatgtagccatcacaattcccgatatcaaagttacgccaagttactaactgcagcgaatactgatgtaggtcaagtgccttagcaattccgaccattagattcatgtaatatggttcggtaacgtcgatgtcttccaagatacacaatttgatgattcgggtactgttgctgactagggctttggcaattaaattgggacggtaatccaattccttcattgcggcatacaccaattccttcaattcatctgttacttgttccggatgattaatcacccgcgaaactgtcatcttagaaacgtttgcccgcttagcgacgtccattaatgttgccatttctccaccccttaagttcaactttttatattctttcacaattataccaatttatgcataaaatgattacgatttaccttattggtattaaaaaagcccatcatctaaagatgatgggctttcccttttttattctataattgtttgatttatctgccgtaagtgctccaagtccgttgctttgatgccagtatgcttagtaatatctttttttagcgctttgtacttgcggaggccttcttcagttgcttctaaccaaacattccgttggtcattttccatatcacgaattttgcgaataaactttttactttgtagcgtattgattttacgggaagccgctggtgcggaggtcccaaatacgactgcaatttggcctggggtgttccgtcctagttccacaatctgttccaacacgagaaattgatcataacttaagccatgtttttcgctcattttattcaattgagtcgtgatgttctgacactccagataccactcactaattgttaatattcttttattatctggcatctgcaaccctccaccgttcattcaatatagttttaacttatgtacaataaatgaccaccggctagtcaaaagccgacaatcatttatttaaaacaaactagcgactcatttcaacttgattaagcagcagttaaggttagtttatatcattgtttggttatgtgcaagtatatttcacgcgacgataattgtcaatcgttcattaaaaaccttttaaaaccaatgtttgagcgatgtttttcggattattttaatttgtagataaacttacgaattttctgaaaacgccaataagaacctttgatgcgaaggggtcacaactcatgagttatgacctagtttatttttataaatgttaattataaaaagattaaaattagatgatgaaaattgcggataaaatgaagctccagcgcgaccattttgatgacatggaaccgaatacaaatatcggcattaaagaagtttacacatgttgcataatcatagatagggattatctctttaaaagatttaacagattcgttttaaaacaacttgtacacaatttaatagcttatcagaatgaaaaaacattaagtccaattggtgattaattgattgaatctttgatatcccaattgataactagaccgtaccaaaggtgtagtgatgaatggaaaaatagaaaaatcatatggaggtagacgatggatagaagaaaattagcgctgggtgcaacaatgctgaccatgttattgacgtttatctgtatcaatagtggtcgtactcaagcagcgatacccgcccatattccaatcgatggcatctttaaaccctccattggggtagatagttccgttcaagcaggtggaattgtgcaagtgacaccagatagccagaacaagaagggggcaatttggtcggaagagcagtataagattgatttgacacataattttacaagtttaatgtatgtcaatttaggggacaaaaaagcgcaatcggttgacgggatggcctttgcaatgatgaatgacccagacaaggttaagaattggcagcaagtgaccggtggcgcccttggtgtttggcggaatccattttcttgggtaaaagataactcagcaatcgccaagtcatttgccgttgaattcgatacgtaccataatggcaatgattttgacggtttgctacccaatgatggcccagatagaggccatgttgcttataattttccaggacaagatagtgcatatcagcgtttaccaagtcgcttgtacgcgctaaaccatctacaacttcaaaaaccgcaaaatggtgattatttatcattagtaacattaggccatatcgtgatggcaccaagtgtacaggctgcgacaacatcgaatgaaacaactacgaggaaaattgcactagaagcaggggacacaacaacgactaacccaccaattgtgccagggacagatggaaacggaaacggaccaactggcgcaacaggggatatcacgattgataatttaacaccacttgattttggtaaggtgaaactgactggtggcgcgcaaaacgttaagaatatcgttaaagatcctaacgtacaagtcaccgataaacggggaactggcgctggctagaatattaccgttaaaagttcagaatttaaagacacaacggattcaacgcatatcttaaaaggcgcacagattaattttccagtcggtaaagtagtcgctagtgattcaacgaatactgctgcaccaacagccaaagcgattactgttcctgctgatgggttggataatgcgcaaatcttgatgagtgctgataaagataaagggatgggaacatgggcagatgtgatgacaactgacggcattacactggatatcgctggtggcgcttatgctggcagctataatgctgatttgacctggacacttggggatacaccgcttcaattagctggcagcagccgctaaatttgaaagaggcaagtgttaagtcgttactgcaacggactaaattttaatcgatgtgcaaagtgattaaagagagggacttcaaaaatgaaatggatgcatattttacaaagaatcagcgtcgtcatcttaatgggcggcatcgcgttgtggttgaatacaacgaccgtccaagcggctgatcagagtatgaattaccaagttaaagcgaatttacccagcagtcaaaacaatcaaagtgtaacatattttgatttaaggctggcacctaatcaggaagagacgattagtatcacggtgcaaaataaggataaccaagcgcatatctttaacatcagtccgaatacggcggtgactaatcaaaacggggtcgttgattatagccagtcaaagaaaaaagcggatgaaacggcgcctgctaatattgcctcactgattacgggggataaaaaagtaacggtgccggctcacagtagcaaggacgccatttttaaaattaaaatgcctgctaagaagttccattgtactttattaggtggttttaatattgttcgtgaagggcagcctaccgttaaaaagcaaaagaatcgcgtgacattgcgtaaccaattcgcttatgtaatcggtctgaaagtgaccgaaagtgatgccattattgcgccaaatctgaaactgaatcacatcaaagcggggctcgttaactatcggacagcaattacggctaatttacagaatacaaaggctgttatgatcagaggcttgaaagttgatgcggtggttaccaagttaggctctgatcaagtgcttcaccggacagtcaaatcagacattgcgatggcaccgaattcgaactttgagtacgccatcaactgggataatgaagcgctgaagccgggcaaataaatgcttaagctaaccgccactgataagtcgggcggttagtggtattttacgagtcggtttaatattacagagcaaaaagcccatcaagctaatgaccaagccgttgatttacaaaaaacaaccattaactggtggtatatcatgtggtggcatattcctggtgctcttagttgggtatattatttttctaaaacgacaagcgaaaaaagcctgattcaatgaagtcccaatcctgagcgcgtcatcgattagaatggattcgaaaataatcccttgataatgaatagatggaagtattatctctattcactaccaagggatttttatatgtgctgcgttattggttgttcggttaattaggtttaaaaaagagggaatggattttatatcacgttatttacgaatgatattcataaacagtggttttttgatgccatttaacgtataataaattaaaaacaaattagagatgaggcaagaatattgatttcgactgaaacgacactagctgggtaccactttgataactgtttcatgaacgcggcgggggtttattgttatgatgctgctgagttaaatcaagtgcaggcttcaatggcagggactttcgtgaccaagagtgccaccgttatgccccgctctggaaatccagaaccacgttatcaaccaacgcgtttaggcagtatcaattcaatgggcttgccgaatgaaggcctaccttattatttagactatgtgagtcaacagcaaaaggcagtgccagacaagacatactttcaatcgattacgggatttaatattgaagaagacgagcaactgttggcacagattagtgcttctgattttaaaggtgtggtggaattgaacttatcttgtccgaacgtaccggggaagccgcaaacgggctatgattttgaaatggtggaacgaattctaacgcgagtttttacggtttatcacggtccattaggcgttaaattaccgccgtactttgatatcgtgcattttgatcagatggcggcgattttgaatcaatttccattagcgtttgtcaattcggtgaatagcattggaaatggcttgaaaattgatgtggcaactgaacgggttgtgattaaacctaagcatggtttcggtggcatcggtggcgattatatcaaaccaaccgccttagcgaatgtccatgccttctatcagcgtttgaatccagccattcaaattattgggactggtgggattaaatctggtcaagatgcatttgaacatattttatgtggggctagcatggtccaagttgggacagcgcttcaaaaagaaggccccattatttttaaacgtttaacgcgcgaattacagacaagcatggctcaaaaaggttatactaaactgtctgactttagaggcaaattacaatatttagattagttgaaatgaggatttacaatgcagtatcgttatttattttttgacatggacaatactttattcgattttgatgcggatgaagatcaagctttggcccaattattcaaagatcaaggggttcaattgaccccaacaattaagacaacttatcagacctttaatcaaaacttgtggcggcagtatgaagaaggtacgttaacccgggaaatattattgaacacacgctttgcaaccttctttaaagaacagtttaatcaggaagttgatggaccaagattgtcccaaaattatttagacaacttggcattaggccatgatttaatgccacaagcagaagctctgttaaaggcgttaaaagcagctaacattaagctatatgtcacaaccaacggggttgccaacacgcaatatcggcggttacaagattcaggattaatcacatatttcgatgccgtttttgtttcggaagagttgggatatcaaaaaccagatccacggtatttccaaagtgtcttccaacaattagaggggatctcacaagcagaagctttgattgtcggtgattcacttacttcagatgtgcaaggtgggcagaacgtgggtgtcgccacagcgtggtataacccgaaccagctagcaaatcaaatgacagacatacagccaacacacgaaattgaacacttaatggacttattggcaatttaaaagccgatttgcggcattcaagaggagtagataaaacatgaaaaagcaacgatattttagaattagcctaggttggcgaatcttaattggaatcggcctagggttagtggttggtcggtttttctaccataatcaaaccgctatctcaatcttacaatcaatcggaaccttgttcatcaatttaattaagatgattgtgttaccaattgttgtttcctgtttggtcgttgggattgccaagatgggtgatatcaaaaaacttggccgaattggtggtaagacgttattgtatttcgaagtgatgacgaccttcgcaattattctcggattagctgtcggcaatattgctaaaccaggagcgctgattgacattcatagtttggcacatggctcaattagtcagtacacagcagccgctaagaccgctggaaatcatggcttgggtgatatcatcatggatatcgtgccaacgaatttctttgcggccttggggtctggtgaaatgattccagtcatcttctttacggtcatgttcggtttagggttggcgacctttggtaaaaaggcaaccccgctcatcgatgcttttgaaatgatttcagaggttatgttcaagatgacaaactggattatgcagttagcaccaatcggggtgtttgcattaatcggggttacaattgcccaattcggatttgaagctttgaaaccattgctctatttcatcatcgtttgttacgcaacgatggcatttttcgtggttgttgtggctgggttggtcgcgcggatttggcacatcaatatctttgaaatcttgaaagttttcaaagaagaattggtgctagccttttcaacggcgagttcagaagcagcgttacccaaagtaatggaaaaagtgcaaaattacggtgttagtcaagggattgcttcttttgtcattccaacgggttattcatttaacttggatggttcggcaatctaccaatcgctagcggcgctgtttttggcgcaagcctatcacattcatttaagcctcacccaacaaattactctattggtggtcttgatgattacctctaaagggatggctggggtccctggtgcttcattcgttgtcttattagcaacaatcaccacaatcggcgttccggctgctggtgtcgccttcattgcggggattgatcggattgtggatatgggacgaactgccgttaacgtaatgggaaactcattagcagcagtcattattgccaagtcagagaacgaatttgatgaacaaaaatatcaacaatatatgagtggcaatgaacttaaataaagcaaagaccttaaatcaatcgatttaaggtcttttttgtataaaaaacgattttagcacaccgcaaacattagcggtatctaattataaaagcttaagtaatgcgacttttagcgcttttttgtcgattatctagaccaatttcgcagataatctaaaaaatgattagacagattagaattttgtggtaaaattaatccagtaaagcgttttaaaaaataaaaacgtggaactgttaactcagtcaataatgtttaagccattatttttttatattaattgatagcgttttattgatgagtatgacaactatttttattaaggaggtttttgtgaatggttggaatcgttattgcaagtcacggggagtttgctaaaggaatcatgcaatctggctcaatgatttttggcgaacaagaaaaagtacaagctgttacttttatgccaaatgaaggaccagatgatttgaaagcgcatttagaagctgccgttgcaacgtttgatgcagatgatgacgtcttattcttagttgatctttggggaggttcaccatttaatcaagctaatgggttgttcgaagcacataaagataggtgggcaatcgttacaggattaaacttaccaatgttgattgaagcttacgcatctcgtttatctatgacatctgctcatgaaatcgcagcacatatcattgatgaagctaaagcaggggtacgggttaaacctgaagaactacaaccagaagaagcacctaaggcagaagccgcacaaacgacttcaaactcaggcacacctggtaagttcaaatatgtcttggcacgaattgattcacgtttattacatggtcaagttgcaacgacatggtcgaagacaactaacccaacacggattatcgttgtttcagataacgttgctaaagatgaattacggacaaacttaattaaacaagctgctcctagtggcatcaaagcacacgtcgtgccagttgatcaaatgattaaattggcaaaagatgaccaacactttggtaaggaacgtgctttgttattatttgaatcaccacaagatgcacttagagcagttgaaggtggcgttccattagaaacaattaacgttggttcaatggcgcactcaactggtaaagtgcaaccaaatactgttttggcttttgaccaagatgatattgatacctttgaaaaactaaaagctaagggcatcaagttcgatgttcgtaaagtgccaagtgactcaaacggtaacatggatagtatccttaaaaaagcacaagcagaactagacaaacaaaataacaaataacatcagaagaaattggaggattaataatcatggatttgaatttcattcaagtgattttggtcatttttatcgcatttctagctggtatggaaggtatcttagatcaattccatttccatcagccagttattgcttgtacactaatcggtcttgtaaccggtcaattactaccttgtcttatcttaggtgggacattacaaatgatcgccttaggttgggctaacattggtgccgctgttgcacccgatgctgctttggcatcaatcgcatctgcaattattttaatacttggtggccaaggaaaagccggcgttacatcagctatcgctatcgctgttcctcttgccgtagccgggttattattaacaatcatcgtacggacattagcaactggtatcgtgcacatcatggatgctgctgctaaagaaggtaacttccgtaagatcgaaatgtggcaatatatcgctattatcatgcaaggtttacgaatcgctattcctgcaggcttaatcttagcaatcggtgctggccctgttaaagaaatgttgacagcaatgccaatctggttaacagacggtttagcaatcggtggtgggatggtcgttgccgttggttacgcaatggttatcaacatgatggcaactaaagaagtatggccattcttcgcaattggtttcgtacttgctactatctcacaattgacacttatcggccttggtgcaatcggtgtttcacttgccctattatacttagccctttcaaaacaaggcggctcaggtaatggcggcggttcaaatactggtgacccacttggcgatattatcgacaactactaagaaggaggctaacaattatggcagaacaattaaaattaacgcgtaaagatcgtatttctgtttggctacgttcaactttccttcaaggttcttggaactacgaacgtatgcaaaatggtggttgggcttactcattaatcccagcaattaagaaattatacaaaacaaaagaagaccgggcagctgctttagttcgtcacatggaattctttaatactcatccttatgttgcttcaccaatcatcggggtaactttggcacttgaagaagaacgtgctaatggtgcaccaattgatgatgttacaattcaaggggttaaagttgggatgatgggacctttggctggtatcggcgatcccgtattctggttcactgttaaaccaatcatcggtgctttggctgcttcacttgctatgagtggtaacattcttggcccaatcatttactttatcgcttggaatgctatccggatgtcattcatgtggtatacacaagaattcggctaccgtgctggttcaaagattacagaagatttatctggtggtattttgcaagacatcacaaagggtgcttcaatccttgggatgttcatcttaggttcgttggttaaccgttgggtatctgtcaagtttacgccagttgtttcatctgttaagttggacaaaggcgcattcatcgactgggataaattacctagcggtgctaagggtatccaatcagccttacaacaacaagctcaaggtttgtcattgacaagcaataaagtgacaacgttgcaagacaacttggatagtttaattcctgggttagctgcattaggattaacattattctgtatgtggttacttaagaagaaagtctcaccaatcgtgattattcttggcttattcgtagtcggaattgtcttccatctattacacttaatgtaaaagagtgcataagcaggcgcctatattttgaggattaactggatttgacgaattggcgatgcaatcgccgatttggcaaatttggttaaccgcaggaatatgcctactgaagcacgtttagaaaacaaaggaggggctaggacaaagtcaatttgtcctagcccctcctttttataaaagcgtataatgaaagtaagtttttggaaatggagtcgatattatggttcaatcgattaatacaaaggtggacttagtgattaaagccacgtcgtttacagcactctctgattacggacaaatcatgatcggggatagagggtttgaatttttcaatgatcgtgacgcacgacaatttattcaaattccatgggaagaagttgactatgtgattgcatcagtcatgttcaaaggcaagtggattccccgctatgctatccaaacaaagaaaaatgggacgtatacttttgcttcaaaggaacccaaaaaagtactccgcgccattcgcgagtatgtgcccgcagaacgcttagttcaatcactaggggtctgggatgtgattaagcgtgtgtttaaacgcaaatcaaattaacttcaggaaggtgtgaccaatattggtcacacctttttttgaatcgaattgcctgtgattttaattggtaccgatttgagtggcgtgctagaatatcatataaggttgattgttcaacattttaaaaaattaagttaaatgaggtaatgatcatgggatttgatgaagcgattaatgcaattaaggctggcaaaaaagtggtacggactggctgggatggtccagaattatttattttccaagtggccgatgggacattcgaggggcaagcaattagtccctacctattaattaaaacaaccgaaacaccagcatactcaatgttccaaccaacatcgtgtgatgtattggctgatgattggcaattggtcgactaatggggcattttgcagatttagcgactaaaaccattttaattaccggggcggcatcgggaattgggtgcgctcaagtggacgcttttttagcagagggggcattggtgttagcacttgatcgccagccgattgaagtccctgttgatagtcggtgcatcacagcgcaggttgatgtttgtgatgaaacgcaattaacaatgacattagcgactttgctggcagaacatggcccaatcgatgtggtctgcaacacggcaggcgtgttggatgcttatgcaccaacgcttgataccagtagtgcggagtgggatcgaattatggcaacgaatttaaaaagtcaatatcttgtaacaaatgcgatcttgccaacaatggttgcgcaaaagcgtggggtattcgttaatatggcttcgattgctgggctagttgctggtggcggtggtgcggcttatacggcatcgaaacacgccatcattggctatacaaagcagcttgattatgattacgccgctaaggggattcgcgccaactgtatcgccccaggtgcgattgagacgccgatgaacgcagccgatttttcggggactggtgagatggcacaagaagttgcccgtcagacaccagcggggcgttgggcacaaccaactgaagttgcgagcttaagtgtttacttggcgagtgatgttgcggattacattcatggcaccgtcgttccaattgatggtggctggattgaaaaataacgctgactaaggagattatgatggcaaaacaaattaaattaagtcaaaccgtttatgaattggtaacggcctatcctgaagtggtgtcggtgcttgttgaaattgggcttgatggggtcacgaacccagcgcttttgaatactgcggggcgttttatgacattgcctaaaggagctaagatgaagcaaattcctttgacgacgattatcgctagtctagaagcacaaggattcgaggtgttagctgatgtgtgagcaacagcatagcagtgcgtaccgccaaaaacgaatcgtggaaatcttaaaaatgctgcatgaaggtggctcgtttgaagaggctaagcggatttttgatgagtccttttctggggttgacgtgtctgaaattacgtctgctgaacgggaattgattgccagtggcttgaacccgatggagattcaacatttgtgtaatgtccatgctgcggttttcaagggggcgattaattcaaatggggctgaaacgccggaacaagaacagccaggacacccagtcgctgtgatgaaattagaaaatttggttatgaactcgctcttaaatgatgaattactgccatgtttgaagaaatggcagcagtcagggactgaccaaaattatctcgtgcggatgcaacaagcgttaaaagatttacagttgatcgaccgccactatttacggaaagaaaacttaatttttccgttgatggatcaatatgggattactgcaccacccaaagtgatgtggggggtggatgatcaaattcgggggttggtgaagacggcctatcaaatggtaactgcggaaccaattccggataaatatgcaattgaagcagccgttgaaaagatgagcaaagaaattcaagaaatgattttcaaagaagaagaaatcatgattccgatggttaatgaagtctttacaccagctgactggggactaattgcttctgaaagccaaccaatcgggtataccttaattccagacccattaccatggcaaccaagtgctgaagctattgcggcggtcgaaaagcggaccgtgccgaagattgcgcaagaactgaatgcgatggcgcaatcgttggcggatgcgcaaatgacgatccaaacaacgccaccagaaccggcaccaacttcgatggcggcagcggctaatattccgtttgaaattcacggacaacctgtaccaaaagcccccgctgaaaaagatgaaggaaaaccagaaatgccagattttgtgaaggcaatgttagctgacgaaaaagaagcggcaccaaaagcgaaggttcaagcacgtcgggaagcaccacaaccccatatcgaaattggcgtggataaccaagctaaaatcgttctaccatctgggtcgatgaatatcagcgaattgacggcgattctccaagtactaccgcttgatttaacctttgtcgatcaaaacgatattgtgcggtggttctcagataacgagcatcgtattttcccaagaacccgggcagtgattggccgcgcagttgtgaactgccatccaccaaagagtgtggataaggttgagaaaattttagcggactttcatgcagggcgagaagacaacgctgatttttggttgaacttccgcgggatgttcgtctatattcgctattttgcggttcgtaatccacagggacaatacttaggctgtttagaagtcagtcaggatttaacggaactccgtgcactaacaggcgaaaaacggttataaaaatgcattaagaggagaaaagagatgcaacaaattattttattacttgccgtcggtgttttagccggcgtgttgggttcaatcttagggattggtggcgggatcattgtaacccccgtattaacgctagcgattggcctagatattaaatacgcgattggggccagcattattgccgtgattgcaacaagttctggtgcaactatcgcctatttgaaagatgatatgctcaacttacgagtggcgatgttcctagaaatcgcaacgaccgtcggggcgattatcggggcgttattgaccggcattgtaccaactggattcttattcatcttattcggcgcattcttgctattttcaacgtacaacatgattcaaaaattacgtggtaaagttgcagaacaacacgtcggcgctggtgaagataagtgggccaagaagttgaacttaaatggcacttactacgataaggccaaccaagaacaagtcgactacgctgttgaacaagtaccaggcggctttgccatgatgttcggggccggcattgcttctggcttgctcggtatcgggagtggggtattcaaagtgaccgccatggatacgattatgaagatgccattgaaaccatcaagtgccacgagtaatttgatgatgggggttacggcagcagcttcggccactgtttatttcttcagcggtgcgattattcccagcgttgctgcaccgttagcaatcggaattttggtgggttccactgtgggttcacggattatgcagtatttgcaaccacgtgtgattcgcatgatttttatccccattttgttatacacaggtttacaaatggtgcttaaaggattcggggtgcatatttaatgacagataaaaaagcagagatggctcaaattgaactcgtcatcggtaaaattttacgcattggggtggcggtttcagcaacgctgctcattattggcatgttacttgcgattattcatggcggtacaggttattcagaatatcaatttccaacgacctttaccgaaattttcagtggcattgctgcatttaaggctggcgctgtgattatgttgggcttattctgcctcattttaacgccagtcttgcgtgtggtggtatcaatctacgcatttgctaaagaaggggattacctctacgtttggattacggttattgtgttggtcatcttaatcatcgggatggcaattggttttataaagaaataaagagtggtttattagctcagtatctcgcgaggattaaaaaaagggccaacgacaaacatgtttgtcgttggcccttttttttgtggtgaattaggctaatccgcagaagataaccgggcttactgcgcactctgatttaaaacgtgctccgacagacatccgcttccggttagctacgtcccgcaaacaatcgacgtcgtcgcttattcacgagattaggctaatcctcagcgtataatcgtctgccgtcgcactctactttgaaacgtgctccgtaagccatcttcttccggttagcgacatcagtcaaatcaccgactttgtcggcaatccgcctgattaagctaatcctcagaagataaccgggcttactgcgcactctattccattcctagtattcttttctttttttcttcgaattcttcgtgggtcattaggccgtcgtcgcgcattttgaggtaagccatgataagatcaccggtcttaacataactgaggtcttcttcaacggttggtttttcgagatagtccgctaaggctgtgtataacttgcgcacagcgaggttatcgtcgggttcgaaactgatgacgattttttcgagggcgtggttgggtttttggtagagaatttggagatgaccatgccgataagtcgcttcaaaaaagcggactgattttaatttgctaaacggaatgtcacgatcctggttttgtttcttcttaaacagtccgggatagtgaattgttaggatattttcgtcataggttaattcgagtttttgaggttttttaatgagataagtttgcatcgcttgctcctttaatcattcttaagtaaaagcacggtagttcttaataaatgaagcctaaacttacctttatcatagtagacagtgaccctaaatagcaagctgttcgtattggtttatgaaatgaggtgggatgatgaaattttttatgggtattcgcaacggcctgttagtggcattaccgatttggtgtttaataatcttctcaattacgtattggttacgctaaaataaaaaaacgggcgccgcacaaaaactgtgcagtgcccgttttttaacgtaaattggctgttttttaggtctaaagacggtttttatgctagtatgaatagattacaattagtgacattgattgcatctaggcgatgtaattattataatgaaatcaaatgtccaaagataaggaggaggaaaccaattgaatattgggatatttacggacacctactttccacaagtcagtggtgtggcaacctccattaaaacattaaaagaagccctagaaaaacaagggcattcggtctacatatttacaacgaccgatccacatgttgacaaagatgcagtcgaaccgaatattttccggtttgctagtgtcccgtttgtctcatttacggatcggcgaattgctgtgcgcggcttatttcacgcttatcaagtggctaaggaattggatctcgatatcgtgcatacccagaccgaattttcgatgggctacatcgggaagtttgtcgctaaaaatttaaaaattccttgtttacatacgtatcatacgatgtacgaggattatttacactatgttttaaacgggaagttattacggccataccatgttaagcaaatgacaaaggcctttttatatcacatgtcaggcatcgtggcaccatcagagcgggtttctcaaaccttaaatggctatcaagtgaaggcccccatccggattattccgaccggggtcgatattagtcgctttgagcgcgaagtgacccgcgacatacgggccgaattgggcttgacgtcagaacaacctgtgctcttatcattgagtcgcgttgcttatgaaaaacggattgatatcttagttgatgcgttacccaaactagtcgcccaaacaccagatttaatgttagtgattgttggtgaaggtccagctcgagaagatttagaagctcaggttgccaagttaaacatgaccgaccacgtgattttcactggaatggttgataacgatgaagttgcaaattattatcatatggcgaatctttttgtctccgccagtgactctgaatcacaaggattaacttatattgaagcgatggccgctgaactcaagattgtcgtcatgacaagtccatatgcggctgagttattaactgatccttcaattgggacgacatttacgaacgaagatgaaatgatccatcaagtatcgaattatttgaatcatccacatgcatttgatgatccagcaccgcgccgaaagaagttgcatgctatttcggcggattactttgcggaacagatgattcatttctataagcaatcacagctattatatgacgaattaaagttagaccaagatgatttattggaattagaagatttagatactaaaaaataagtcgcgctggcggaaaactgttgatcatataatcaacagttttttcatatcgttgctaataacaagaaaaagggtcgtttatgagtagaacgaataagattgtttttgcagtcatgctgttgattgggtgtgggatttttgcctatgaaagtcgcacgctggcgttgaaacagctgtttatcgatattagtcatctgaaactttggtggctgttggtcgccttattatgtatgttaatttcgtggtttttcgaagcacttgtcttacgcgtctttctaaaagaccgcacagaacacttttctttatacaatgcgcttcggattccgttgattgcacaactattcaatgcgattacaccgttttcttcaggtggacaaccggcacaactggtagcgttgatgcaatcccgtgtagaagctgggcaagctagctcagtactgctgatgaagtttattgtttaccaattcatggtactggtgaatttcttattaagtatgatgattggtctctcgcaagtttccaagcattttgggacgctgtcgattttgattactttcggattaatcgtgcatgtggttgtgttagccgtattgttgctaatcatgtattacaatcgatttacgaaacagttagtgcactggttattaattccggtgggctggttcgtctcccaaaaacgggtgacggaatggcggacaatgttaatggccaaaatcgataccttttacgcggagagtctacaccttaaacgcgagaaaaagaaactaatcaagggctgtattttaacccttgggcaactttttttctattatagtgtgccatactttgtcttattggcacttggcatcccgcatgttaattatttagaggtgatggtcttacacatcatgattgtcatgattgtctcgctctttccagttccaggcggttctggtggggcagaatatagttttaagacgttatttgccacttttatcccgagttcaagtaaactggtgttaggcatgttgctctggcgattgtttacgtactatctcgggatgttcatggggattggggcgttagcagttaaaccacgagtaactgataaaaagtaggaggcgtttttgatgcaaccaacaattggcttcattggaacaggtgtcatgggtagtagcatggtcaagaatttattgaaggcagactatccagttgtcgtgtataaccggacaaaacaaaaagcggatgcagttgtggcactcggtgcaacatgggctgattcaccagcagcggttgtcgcgcaaagtcagattgtgttatcaatcgtcggttatccgcaagatgtcgaagccatctattatggtgaagacggaatttttagtgctgcacaacctggtcagattttggtggatatgacgaccagcacgccaacattggcgcagagaattgccaaaacagcagctgacaaaggtctgcaagcattagatgcgcctgtttctggtggcgatatcggcgcccaaaacgggacgttgacgattatggtcggtggcgatcaagctgcctatgaaacggcattacccttttttgaagcaatgggtaagactgtccatcgcttcggtgctgccgggacaggccaacatacaaagatggccaatcaaatcatgattgctggcacaatgaccggaatgacagagatgttagtgtatgctaaagcagccggattagaactagaagcggttttaaacacggttaatggtgggagtgctcagaactggagccttgcaaactatggtccacgtattctagcgcaagactatacaccaggctttttcgcaaaacattttttgaaggatttaaagattgcattaacggaatccgaaaagatggggctccatttaccagctacgcttcaagctaagaaactctatgcgcagctcgttaatgataaacaattaggcgacgatggcacccaagctttaattaaattatggtggccttctgcaaaataattggatataaacggtgcagaagtgctctttttctgataaactgatagttagttattaaaggaggcttcgccatgcaatcatcacagttagttgcgattatcaaacgtctggtagcaatgcaagaagatcaaagcgctgaggttcaagaaagacgttttgaaaaggacggcgatttaaaagcaactgttagctatgatcctcaagctcaagcatttgaacttgaagacagcaacacacatcaacaattccaatttgacaatattgatttagttgcaatggaactatacgatttattagcagactagttaattaaccattgagtatcgaattacttgatggtttttttgctacttaagcaggtgatagccttgctcagttgcgactcagattattaaaaatggtttaatatttggcattcaagccggttacatattgcttttcatttcacggatgtgtaaactaactttcagattgtcaacggcttttaaagcccaacgacctttaacggaggctactgtatcgatgaaacaaattggtcataaaattcaatcaggattaagcacacgatggggattcttccttttcgcagttgcgctattctggcttaaaacaatttacgcatatcaaacaaaatttaacttaggcgtcaaaggtggcatgcaggccttcttaatgacgattaatcccattccaacaaccttattgctatttgggattgccttgtttatgaatggccgaaagtcatacattacgttgattattattgatttaataacctcaacttggttattctcgaatattttgtattaccgtgaattttcagacttcttaacgtttaacttaatgaagggctctggtgcggtatcaaataacttgggcaagagtattgctgggattattgaatattctgatttcctagttttcgctgatgttttattgctaatcatcttattggctactaagttagtgaagattgatcaccgtgtctttatgaagcggaatgcatttgcaattactgggttagctgttgtgttattcggtgccaacctcgggattgcagaagcagatcgttctgggttattaacccggacgttcgataacaactacatcattaagtatcttgggatgaatgcatacactgtctatgatggcgtgaagacgaccaagaataatgcgattaaggctaatgctgatagtagtagtatgagtagtgtcttgaagtatatgaaggacaaccgggttgcacccaatgttgaatacactggcgtggctaagggtaagaacgtctttgttatccatttagagagtttccaacaatttttaattgattataagtgggacggtcaagaagtcacaccaaatatcaataagctatatcacgaccaaaacaccctcagtttcgacaatttctttaaccaagttggtcaaggtaagacggctgatgctgaattaatgctcgaaaactcattgttcgggttacctgaaggggccgccatggtcactcaagggacaaccaataccttccaagcagcaccatcaattctagatcaacaaggttacacaaccgcttcattccatggggatgtgccaagtttctggaatcgggataatacctacaagtcatggggctatgattacttcttcagttctcaatactttaaagaaggtaaaggctacaacgtgggttatggcttgaaagataagatcttcatgcaagactcagcccaatacattgaacaattaccacaaccgttctatgctaaattaatcaccgtgacaaatcactatccatacttattggataaacaaaatcaatcaattgctaagaccgatactggtgatgatacagttgatggttatgtgcaaaccgctaagtatttggatcaatcaattggtgaattcttagcttggttacaaaagactggcttagataagaatagtatgctcgttctatatggcgatcattatgggatttcagggaaccataagaaggctgttgcgaagttattgaatcaggataaatttactgattttgataatgcgcaattccaaaaagtaccgttcatggtgcatatggatgggttaaaaggtggcgttaaccatacctatggtggtgaaattgacgttttaccaactttattgaacctattaggtgtaaaaaatgacgataccatccaatttggttcggatttacttgcgcctaaccgcaatcagacggttgtctttagaaatggggactttgtcacaccacagtatacgaaggtaggcagcacctattacgatacgaataatgggaagacgctgacgaatttaacggcagcgcagaagaagcaattaacggcaatcagtgaacatgtaacggaagaattgtcactttctgacaaggtaatcaccggcgatctacttcgattctatacaccacaaggattcgaaaaaccagataagtctaagattagctacaaggtgaaagatgctaaagctaagttgaaagacagtaacaataaaacgagtgttatccagcaaaataatggtaagtcaacaatggacctttatgagacggatgcacctgaattgaagtaaagtatgtaaagacgttacgggactcgcgtaacgtctttttttgagcaaagatacttgtcagtctcgtcaaaaaaaggtacgattacagcaataaggatatatgataatgattatcattagcgaaaggtggtggcaaaatgagtcacatcgtgcaacaaacgttacggaaactcaaagaacacaacgtacggatcacgccacagcggcaagctgttttggaattcatgattggcactcatatgcatccgactgcagacgatgtctataaggcgctagcagggcgctttccgaatatgagtgttgcgacaatctataataacttgcgtctgtttacctcattagggattattgaagaaatggcttatggagatgcatccagtcattttgattttgcgcagaccaagcattatcacgctatttgtgagaactgtggaaaagtagttgatgttttttatccggagttagatgatgtagaagtgattgctgagaatctaacggggtttatggtaactgggcaccgaatggaagtgcatggtatctgtccagaatgccaagcaaagcttgcaaataactaagttgtttgaatatttagaaaaaagatgaattttatgcaaattttacttgacgatagatttagatgttggtatagtattctatgttgtcagcgagagaaaagctcatcgctaacgaaataacgggtcaaacgagattgaataaatattcagaaaatatttataaaaatcgcttgacagtgttcgttagaaatgatatattaattaagctgtttcaacacagtagatctttgaaaactgaacaaagtttcgataaaccaaatgtgtaaataaaaaaatcttccttatcccttttgtatcaacatttttagcactttaagacaaaaaaatagaacacttaaaagtgttctaaaatcgcttatttaaggagagtacaggatttgaacctgcgcgccggtataagccggttcgacggatttcgagtccgttgcattaccactctgccaactctccagaacgttattcattataacagacttctaaagaactgaacagcgtaaaacgcaaaaaaacctacgtgcgcccacattctattcgatcaccaccatcccatcttgatcaaattgccagtcctttgagtaagcgacttcccaatagtaaccatcgggattactgaaataaccactatagccaccccactcgccccattctggcgctttgatgagcgtggccccgttagcgagagctgttttaaatgttgcatcgacttccgcttgactatgcgtattaaaggcatgggtcacgccgttgaacgttcttggaaatggatgattatctgcggataagccaatatcggctagtagtgcagtgtacggaaacaattccaacttggtcccagtattattgaaaaagacgattgtctcagcattttctaaattcggcgcttgaaagccgagtgcttggtaaaactgccgtgacacggttaaatcctgaacacctaaacaaattaaatggatactattcatcaaatcacctactcgttttaaattaacctgattgtatcaatccgaagctaataacgcaattctccctgttaattggccaattattaaatttattgaatcatatttctttttataaaaaaattcgttatacttaaagaatcttaaatgatagaggtttattaatatgaagatttcttatcgcaaactaccgtttttattcaacttaattttcttagttgtaacggttttacaatctttgatcattctagtggttaacccccacgttacgaaattcatccccacttatatggatgccatggcgaaagtatggtggttgtgcattattgctattattttgcatattgttgcttatttattatcactcgatcagaatttgattttactggcatacttatgtgcaatcgtcgcttacatcatcttgattttagtccctaatctattactagttgcccttttcttgttggtggttagcttgatcatttcatttaaagtctatcatttccattatcgaacacctgcttagtcctcgtcggagggctatttttttatgcgccaacccacttaatttatggtataattagtttgaaattaaaacaaaagaggttctagtaatgaaacgattaactgcgattctatctttattggtactttgtttactgccttttgtaagcccttactttttcgataaaggcatgcgcttttctagcaatcatcaaaaaaatccaatccgctttgaagtttgtcggcatccaaaggtccaccacgcagtcgatcgtgatggcagtgaacaaaaattaaacgccttcaaccaccgctgcgaacggttctttaatcaactcacacttgcgcctgaagcattctacgccgtagctagatttcttggatttaccgtctttattctattattagaaccactacttgcactcctaatgaccctcaagaaagtgccacaacccaaaaaggcacaatcccatactccgcagaagcatcagattgcgccttataagtggcatttattagattagtttaagttcaacttttgataagtataatggccctcttttagtgattgattcgcatatggcgtctcattgagcaacgccacatattcttgggcccgttgttccgaactaaacgcccggatcattttacttttatcataataaagtgggtttgcttgatataaaacaacgtagatccattgattcatctgtcatcacctaactttgtaatccacataaagaaagaccaactcgtaatgagtcggccttttttaatgtcatcttaacgacgagcttctttgatacgagctgccttaccacgtaatgcgcgtaagtagtataacttagcacgacgtacacggccatgacgagtaacttcgatttgagcaacacgtggtgagtgtaatgggaaagttctttccacacccacaccgctactgattttacgaactgtgtaagtttcactcacgccaacaccatgacgtttgataacaacaccttcgaataattggatacgttcgcgagtaccttcgacaacacgcacgtgaacacgtacgttgtccccaggacggaagtcaggaatatctgaacgtaattgagacttagtaatttcttgaattaatggattcattttgaatctctcctttttccacagatattcattaacgtcttgcgccagcggaataccgttattttgtgactaatcatcacaatttttaattttagcataattcaactgagaataaaagccttatttttcagccgcttcttgcttaatttcttgtaaccagtgcaactgatccttggtcaacgtcatcttctctagtaagtctggacgccgttcatatgtccgtttcaaggacatcttctcgcgccactcgttaatgagcttatgattcccgttcatcaagacttcaggtacctttaaaccgcggtattctggtggtcgcgtatattgtggatgttccaataagccggtcgaaaaagaatccgtaaccgctgattgttcattccccaagacgccaggtacaagccgcgaaatggcatcaatcatcaccattgcgcccaattcgcctccagtgacgacgaaatcgcccaatgagacttcatcagtgactagcgtgcgaatccgttcatcatagccctcgtaatgcccacagataaaaaccaagtggtcttcttgagcaaattcttcggcaactttttggttaaacgttaccccagctggatcgagcaaaataacccgtttgtgccccggattcttggcattcacttgatccatcgcctcaaaaatcggttgtggtcggagcaacatccccgcacctccaccatacggcgcatcatcaaccgaattgtgtttattgactgaaaaatcacggaaatccgtcacttctaaatcaattaagtcacgatcaattgccttaccgataattgattgggataacccattttgaaccatatctggaaataaacttaagacatcaatcttcattatcaatcaatccttctggtacttcaacgtaggctttacccgcttcaatatcaattttcttaacgactgacttcaaaaatggtaagagtaagtctgaacggccgcggcgcttgatcacccagacatcgttgggacctggatcgatgatttctgagactttcccatagctggtcccatcggcttcttcaaccacttctaagcctataatatcaccgtagtaaaactcatcatcttccagatcatcttcgcgttgacttgcagcaatctttaaattatggcccttgaactgttcaacatcgttgatattgcccattccttcgaactgtaatagatagaattgcttgtgttggcgcattgccgccactttaacatcaacaaggccattgggcatttcgacggccagttgcacgccttttttaaatcgtgaatccgtaaagtcagtcgtcgcaatgacccgcacttcaccacggatgccgtgggtattgacaattttaccaacttgatagtatttttctggcatttaatttctccttaatcgacaaaaaacgcctaaataaaacatctctgcttcatttaaacgtttttgttaggcatctacaatatttaaacggacccgtttttggtatggtgctttcacactatagacaatggtacggatggactgtgcaacccgtccctgcttgccaatgacgcgaccgatatcacttggattaacctgtaagtcaaattccataaaacgttctgtctcatgttcagtcaatttgacgtcttccggatgttcgacaagtggctgaacaattgcaataattagttccttcacgtctgtcataacgaatccctactttttagcgaagcgtgcttcgtgatatttttgcataatcccttgttttgataaaagattacgaacagtatcagaaggttgtgcgcctttttgtaaccaatccatgataacttcttcttctaacttcaagtcaactggttctgttaatggattgtagtaacctacttgttggataaagcgaccatcacgtggtgaacgtgaatctgcaacaacgatacggtagaatgggcgtttctttgaacccatacgtttcatacgaattttaactgacattaatgccacctcctattaattctttaacatgtcataatataccaaatttcaaacgccgtgtaaagtgttttttctttacaggacaaatttttttaagatttaaaacgacgcgcgtttttgagacgtttcttcttgtttttcttttgttttttcatcattgaattcatggccatcttacccattttacccttgataccgttgcccattaaaccttccatgccgttaaagttgccctttgacatttggttcatcatctttttcgattgattgaattgtttgatcatccggttaacttcaacgattgggcgaccagcaccagccgctaaacgacgacggcgactaggattcaataagtcaggattttcccgttcttgtggcgtcattgattgaacgatggccttcatatgcgccatgtctttcggatccatcttgatgttcttgagttgtgggttattagccatccctggaatcatcttcatgatatcttccaaaggtcccatgctctgcaattgatccatctgatccaagaaatcgttaaaatcaaagctattttctttgatcttttcagccatatcagctgctttttgctcgtcataatcttgttgcgctttttcaatcaagctcaacatgtcacccatcccaaggattcggctactcatccggtctggatagaaaatgtcgagttgatcaagtttttcgccttgaccagtgaacttaattggtttgccagtgacggcgcgaattgaaagggctgccccaccacgtgtatcgccatctaacttggttaggacgaccccggtgacatctaaacgactgttaaagccttcagcaacatcgacagcggcttgcccagtcatggcatcgaccgttaagaggatttcatttggatgggctagctcattaatatcagccaattcttgcatcaaggcttcgtcaatttgtaaacgaccagccgtatcaattaagacgtaatcgttcttttgtaaggccgcttgtgctaacccttgacgaacgatttcaactgggttgacatccgtccccatttcaaagacttgtgcgtcaacttgcttgccgacggtcttcaattgttcaatcgcagctggccgataaacatcggcggcaatcatcaatggccgtgctttttcgttttggattaaatattttgctaatttcccggccgtggttgttttcccggccccttgtaacccaaccatcataatgattgttggaatatgtggtgatttattcaacggcacagccgtttcacccatcatcttcgttaattcttcatcaacgatttttacaatttgttgtgcaggtgataagctatcaaggacttctgccccgatggcgcgttccttgacgactttaataaagtctttaaccactttaaagttaacgtcggcttctaataatgccagccgaatttcgcgcatcgcttgattgacgtctgtttcggtaatcttccctttacgccgaagcttactcaatgcgccttgtagtcgttctgttagcccttcaaatgccattttttatcagtcctttaagttaattattgttcggttaaattcagtaagtcagccaacaagcgcatcagttcttgatcgtctggatagtgcgcttgaatatacttttgtagcgtatctgcactggcattttgctgttcataattacggtaaagatgtagcttttcttcgtaaccctctaagattttttcagtccggcgaatgttgtcatagaccgcttgccgactaacattgtattcagcagcaatttcaccgagggaaaaatcatccccataatataaagagatataactatgttgttttgccgttaaaagtgcgccataaaattcgaacaacgaattcatgcgtgcgttttgtgcgagttccatttgacgcctcctagacttagtttgacctaagtattagagtaccgattttaacgggcttagtcaacgttttattgcgcgatttaactagaagtttgtgcattaattatcttttcactggtataaacgaaaaatcatgctaaaatagaactgtaagctttttcataacttaaattggaatttctatggaggttgtatgatggcagcaacaattatctattggggcgttatattcgcattaatcggttgggggatttggaacttaatcttctcagtcgtctatttaaagaacaaggaaaatggtaatctttggttcttcgccattttaaacatcttaaccttattattcgggctattattctggtgggtcttcaacaatcacgcttggcaagaatactggttggttaaagcaaccgcaaccaacagtctactaggtggcgttttaatcgcctatgtcgtcttaattatcgcccaagtgattttgggacgcgaaccaaaagccaaaacagcttaatgctaaaaaagaggatcgacacgtttgtcggtcctcttttctaatgttgtttagcgattaatcgcgcgatattttcactgacttgcgttaaattaacttcagtagcttcaattgcttttgctaatgacattgcgccaggtgttgtgcagaaaatactgtcaattcctaattcataaagcacatcaatccccgctccaatatatccggcaatcgcaatcaccgtcgcctgtggattaacttgtttaaccgctttggcgactccaattggcgtcttaccatattgtgtctgaaaatcgattccgccctccccagtgacgacgatatccgcatctcggaaaatctcagttaacccagtttgcgccacacgaccatctcaacaccaggttgaacctgcgcatccgtaaacgccaataaaccagcccctaagccaccagcagcacccgcacctggtatttgcgcaacagatttccctaaatcacgttcaatcaccgcagcaaagtgcgttaaattccgatcaagttgcgcgaccattgctggggttgctcctttttgtggaccaaacacggctgatgcgccattcgggccgacaagcggatttgtgacatctgatgcaatcacaaccttaacccttgatagtgccggtatcatatgcgtcgtatctatccgtgctaaacgcgcaagcgccccaccgcccagtggtaacacctgtccgtcaacatctaacaaacgcaccccaagtgcttgtgccattccagcaccgccatcattggtcgcactgccgcccaaaccaatcacaattgtttgcacaccttgtgctagtgcggctgccattaactgaccggtaccataagtcgttgttatcaacggattttgcgtttgcgcatcaacatactgaatcccgctagcagctgccatctcgatcaccgccgttttgccatcacccaagatgccatattgtgctgataccgtttggtccaatgcattttgcacttgtgcggttaagaaccggccattggtcgcatcgacaagcgctttgacagtcccttcgccgccatctgccattggcacttcgacataggacgcgcttggtaggcttttttcgaatcctttccgcattgcacgagccgcttcttttgcggtaacagcatttttaaatgaatctggtgctaacacaattttcatctgttaatctctctttcttctaaaaaaaggctagaacaaattatttgtcctagcctttttgctatttaatcgcttgactgacgtctgtatcagttgttttttgtggcccatcaccgacaataatatccttgaataagccataaacaaagcggtttggatcaaagagttgtaagtcgttcatttgttcacctagaccaaccatcttcactggtaagtgtaattctgtgcgaacggctaaaacaatcccacccttggccgaaccatctagcttggttaagacaatcccagtcacatcggttgtttgcttgaattgtttagcttggactaaagcattttgtccggttgttgcatctaagaccaacaatacttcttgcggtgcagctggtacttcacgcgtgatgatgcgtttcactttttccaattccttcatcaagttgacgttgttttgcaaacgaccggccgtatcaactaataaaatatcgaattgttcttctttagcgcgcttaaccgcgtcatagacaactgacgctggatcactccctgctgcactagcaaccacggggacattatcccggcgaccccattcttgtaattgttcgatggcgcccgctctaaaggtatcaccagccgctaataagaccttcttacccgctttttctaattggtgggcaaacttcccgattgaggttgttttccctgcaccattgacaccaacgaataagaagacagttaattcgccttgtggagcgaaatgcaattgattatcttctgcttggccttcttgaccgtacaaatcaactagcttttcaacaatcgcttgtgaaaccgcttctggtttcttaacgttacgcaacttcacttcgtcacgtaattcgtcagcaatcttcatcgctgtttcgtagccaacatcggcttcaattaacatttcttcaacatcatcgaaaaaggcttcatcaacacttctaaagttagcgaacaacgcatttaagcgttgcccaaatgtgagccgggatttttctaatccatcatcatacttcttcgtttcagcagcttgcatgtcgccagttactgcttctgtttccggcacttcttcaatcgcatcggattcttcagttactgccgacgcttcaactggttctggttctggttctggttctggttctggttctggttctggttctggttctggttctggttctggttctggttctggttctggttctggttctggttctggttctgagtttacgggtgccgccgttggtgtgtcaagcggtgataccgtttctgaatcatcttcagttgctaaactggctggttcatcggtttcagttttctcagctgccgcagtttctgcaggggtttgcgattcaaccggcgtagcgtctgattcaaccggtgtttccggtatcgcttggtcttgttcaaccggtgtttctttttctggttcggctgagaatgcttttttaatacgatcaaataatcccatggttttcctcctaggctgttgcgtgttcttctaatgaaacggaaacaatcttcgagattccagattccgccattgtcaccccgtataagcgattggcttgggtcatcgtcccttttctgtgggtaatcacgatgaattgtgtatcactctcataacgtttcatgaaacgaccgaaacgatcaacgttggcttcgtccaacgaagcttcgacttcgtccaaaatacaaaacggcactgggcgtacttttaagatggcaaacaataacgtaatcgccgtcaatgcgcgttcaccaccagataaaagactcaagcgttgtagtttcttaccaggtggttgcgcaataatgtcaatcccactcgttaatagtgcgcttggatccgtaaacgttaaactggcatggccgccaccaaacatgatcgggaagatggtttcaaaagcagcggcagtttgttcaaacgtttccttaaaccgcttttcaacttccgtatccatttcagccatcgatgctaataattggcgcttagcgtccatcaagtcggcatcttgttgcatcaagaaatcgtaacgttctttaacatgttgataatcatcaatggccgccaagttgaccgttcctaaatcagctaagccgagtttcaataatttcaacttagaccgcaattgatcgtcggttaagtctgatgcggccaaagcggccttggcggcttcgtaagtcaattggtaatcttcgctcaatgtatttaagcgttgatcaatgttaattttaacccggttgagcccgacagcattttgttcttgctcagctaaactatttttttgtaattggtagacgcgtgtggcattggcttgaagcgtttgttgttccgccttcagcgtttctttttgcgcgcgttcagtggctaacttcgcttggactttctcaatcaaagcattggttgcctttagcagtgctcgtcgttctttttgactcgaagcgtcttcttgatccgcttgttttagcgcagctagtttatcctgactggccttcaactgggctgccaggtcgttgctattgcgagtagcaaccgttaatttctcctgaacattcttttgttcagcttgagcgacagccaacttggtttcgagggctgtttgttgttgcgcaatttgtttttgactctcatcaaaatgttgtaattgctcattagctgtttcgagatctgcttgcagctgtgcaatcgacgcaacaatttcagcttcggctgccactaattctgcctggcgttttaaatctgcctcataagcttgttgttgttgttgcacttgataatcggttgcttgttgttgccgttcaaactgactcaaacgttcgtcagtcaaggctaacgtattttgggcagcttgatattgattcttagcggtttccaatgccgcttgtttcgtatttaattctgcttggcgtgccgttaattgagcttttgcggcttggacactggcttgcttttgatccaaagcgacctgcatcttggcaatttgaccttctaaatcagtcaaggtttgcttacgcgcaagtagcccaccattgttttgtcggttattatggcccccagtcatcgaaccacccgggcttaaaatatcccctgctaacgtaatgattcggtaacgatgccccgtcaattgactcaatttaatcgccggctccaactcagtcgcgacaatcaaattgcccatcaaatggttcatcaccggtcgcacttgttcatcaaactgcacaagctcactggcaattccgataaatccaggctgctgttgtaattggtgaactaagctacttggtagtaaacgtggtttgacaacgttattgggtaagaaagttgcccgcccaatccgattggttttcaaatactcaatcgcttgtttggccgtctgttcatcccgtgtcacaacttgttgtagctgtgcgcctaatgctaattcaatcgcttgttgatactcactgggcacttgcatcaattccgctacagcccctaataaaccagggaactgttgtttttgcttcaagacagccttaaccccttgataaaagccggcgtagtcatcatttaattccgcaagactggcttgttttgctttcgctttttgtaaaataccagacgcttggaaccaactattttgttgattttggtaagccgcttggtccgtgttaatttgcgtttgtaattcggccaactcattggacaacgtttcgtattgcgctttgagtgtttcaagttgggctttttgggccgcttgttctgcctttttttgtgccaattgcgtcgatgtctcatcgactgcactatcttgccgtgcaagttgcgttttagtttgtaacaagttcttttctaaatattgttgttcattatgattggtcgtttgggcttgcatctgatcgatgtattcttgacgaatttgttcaatcttcgctttcagttccgcttcactaccagacgcttggcgtttaagggtggttaactccgtcttcaacgcccttaatgccgtcaccttttcttcataacttgcctttaattcagattgattggcttgttccgccgttaattgctgttttaatgtgtcgatctgttcgactaaactttggcggttcgcatccgtataattagcgcgctcttttgaaacgttctcttggcctaatagattttcagctaagcgagacttttctaacaacgtctgattatcttgttctatttgttgttccaactgggctaaggttgcctgattctcggtttgggcagccgtcgtcttagcgatgtccgcttcaatctcttgcaacgcttgcgcaagggtttgcgccttttctttgtacgtcttttgatcagccactaattgatcaatttcaatcaccaataattgttggtgcaacgtatcatattgcgctttttgatccaagtaatcctgcgcaatactgctttgttccttcaacggttcaacttgtccccgtagttcatgaagaatgtcggtgacccgactcaaattttcatctgtttgatctaattcagattgagcctttttcttttgttgtttatatttcaaaacaccggccgcttcttcaataatattccgccgatcttctggtttactgttgaaaattgcttcaacccgaccttgcgaaataatcgaaaaagattctcgcccaaggccagaatccataaataaattaacgatgtcttttaaccgacaactcttttgattcaaataaaactcactatcgccatttctaaataaacgccgcgtaatcgtgacgttggcttgttcttgtttcaaatattgatcgctgttatcaaaagccagcgtcacttctgccttattcatctgtggtcgaatatcagtcccggcaaaaatgatgtcgggcatcttttcgccccgtaagctcttggctgattgttcgcccatcgcccaccgaattgcttctgtgacgttacttttaccgctcccgtttggtccaacgatgcccgttaaaccttctgaaaaattgatttctgttttatcagcaaatgatttaaaccctgataaaaccaatgactttaactgcatgcactaaactccctacacacggcggttggtttcaactgtcgtttgcttctttctttatttcagtttggaaagcgccactttagcagctgcttgttcggctgcttttttgttccggccaacacctgaacctaagacgcgatcgcccatcatcacatccacctcaaattgacgggcatgtgatggtcccacttctgccaataacttatattcaatctcaacttcaccatcttgttgcaagaactcttgcagattggtcttataatccgtttggtctgaaaattcaccggcttcaatcttgggaaagacaacttgttcgatgaatttaacaactgcgccacgcccttgatctaagaacaaagcgccgttaaaagcttcaaataaatcttccaaaagtgttgctcgtgcccgcgcaccgtttttttcttcccctttaccaaggcgaatgtatcgatcaaagtgcgcttctttggcaaaactactgaaactcttcgtgcagacgattgccgcccgtaagcgtgtcagtttaccttctggccagtccggatattttttatataagtattccgaaaccgtaatttccatcaccgcgtcacccaagaattcgagccgttcgttatcacgaagacccaactcccggtgttcattgacgtatgacgaatgtgtaaaggcttcgtccaatagtgctaaattctgaaattcaatgccgtagcgggctcgaagctcgctcactagtgctgcatccaaaattaaattaccccatttcaactgtttaatctttcactattataccgtttatacgcttaaaaaaacagcgtcgttcctagcaaaccgtttcttttattaatcactaaaaaacgcctgttttgaagtattcattgtaacacgcaaacgaatatttcaaaacaggcgttgctttatgcagatggcgttgtcattgctgctaaagcggtttgataactcgctagttcagcttcagttgcatagacatagtgttcatcggccacttcgcgcaattgacgaccttcattatctgcctcaattgaactatcataagcaattcgccgacgttgccgctcgacctttggatcaggtaacggcacagcagacaatagactttgcgtatatggatgcaatggtcgatcataaatgtcatcggctgatgccaattccataattttaccgttatgcatcaccgcaatccgatcactaatgtatttcaccatcgataaatcatgtgcgatgaataaatacgtcaagttttgctgttcttgaatttctttcatcaagttaaccacttgtgcttgaatcgatacgtcaagcgccgaaatcggttcatccgcaatgataaatttaggttttaccgcaagcgcgcgggcaatcccaatacgttggcgttgcccaccggagaattcatatggataacgcgttgcatggtctttattcaaaccaactaattccaaaagctcgttgacgcgtgcatcacattctgcatcatttttaaccaaatgatggatatgcaagccctcagcgatgatatctttgactttcatccgtggattcaatgatgcgtagggatcttggaaaatcatctgaatctctttccggaacgccttcatttcacgactatgatttttaatcttactaatgtcacggccatcgaatagaatttcaccatctgtcgggttgtatagccggatgatactccgcccagttgtactcttcccagaaccagattcacccaccaagccaaacgtttcgccttcatagatttcaaatgagacatcatcaatggctttgacttcggatttttttccttggctaaaatattgctttaaatgtttaaccgacactaatacttttttatccttgtccatcaattgtccctactttctcttgaacttgtgtcgcctggtacttagccatcattgcacggacggctgctggtggttccacagctggtgcatctggatgcaacaaccaagttgccgcaaaatgcgttttcgacacttggaaaaatggcggttcctgttccacatcaatttgtaaagcatatggattacgcggtgcgaaggcatccccttttggtggatccaacaagtctggtggggtccctggaatggcttcaagacggccagaagtatcaagtgttggcattgagttcaataagccccacgtatatggatgcttgggttgataaaaaatttcatcaaccaacccatattcgataatcttaccagcatacattaccgctacgcgatcggcaatccctgccacaacacctaaatcatgcgtaatgaaaataattgaggtttcaatcttgcgttgcaattccttcatcaaatcgataatttgtgcttgcactgtcacatcaagcgcggttgtcggttcgtcggcaatcaggatttgtggataatcaacaatcgcaatcgcaatcacgattcgttgccgttgcccaccagaaaattgatgcggataatctttcatccgtgctttggcattcggaatacccaccaactctaaaacactctgtgcacgtttcattgcttcttccttattcattgttttatgaatcaacaagggttcagcaacttgtttaccaatcggcatcgttggatccaatgacgtcatcggatcttggaaaatcatggaaatatcgctaccacgtaaggcattcatttcctgttctggtttttgtaagagatcttcattgtgatacttgattgtaccacccttaatttgagcattgcccgctaacaagcccataatactacggaccgttaccgacttacctgaacctgattcaccaacaatcgctagtgtttcgccttttttcaagttgaaactgacatcgcgaatagcatggacgttccctgcgtaggttttaaaatcgatacttaaatgtttaacttctaaaatatttgccatttgacgacctccaatgatgaaaccgcgtggaaacggccttgtattgacatgctttttgaaactgactctgcttctaaacgtgctttcattaactgctttttatggttagctacgtctaacaaataatcaacaagttgattattcgccagactatgctaatccgcgaaagataaccgcctacttacacacgctatgattttggatcgaatgcgtctcttaatccgtctgctagtaagttgacggcaatcatgatcacacagaggactgctgctggataccacatttgatatggcaagaaacggaaagctttttgcccatctgataataacgtccctaatgaagcattcggcgctggaatcccaatcccgataaagctcaagaatgcttcgaagaaaatcgcactcggaattgtaaacatcgtttgaataataatcgttgaggataaattcggaatcagatgtttccaagcaattttggtggaactttcacccaacgtccgtgcggcgagcacgaattcttgttccttaagttggaacgtttgagcccgaatcaaccgggccattgtaatccaaccggtaaacccaatcgcgatgacgattgacaataaacctggacggagtaccaacatcatcaagacaaccacaattaagtttggaattgatgaaatgatttcagttacccgctgcatgaacatatccaaacggccaccacgccatccggaaacaatcccatatggaattccgattaataaatcgaccaatgtcgctagaatcccaattaataaggataagcgtgtcccgtataaaattcgtgataataaatcacgaccgagataatccgtccctaagataaacgttttgcctttgggaacgcccgcttgttgatatttatcaactttaacaccggaaacgtccatcttaccggtaaaaccagggatattccccgatccaattttagggggtaggttagcgtacgccacattttgtgtatttggactttgtggtgcaatcactggtgccaataaagcagccaacatcacaatcaagaggacaactaatgaaaccaccgcgactttattttgctttaagcgccgaatggcatcttgcgtaaacgtcaatgatggtgcactaattttttcttgtgcttcatgcgtgtcttgtgtaaggggcttgaatgagcccgctggtattttaatatccgccatttagtgcgccccctgactgtcacttaatcgaattcgtggatcaataatcccgtaaagaatatcgacgactagaataatcactgttaataagaatgaatagaaaatggtcaagcccatgattgttggataatcattcgtcataattgacttcacaaattgttccccaatcccgggaatcgagaaaatattttcaacaactagtgacccagtcatcaagttgactgccatcggcccgataatcgtaacaaccggaatcattgaatttcgtaaggcatgctttgccactgtttgccattttgaattgcctttggctttagcaagttcgatgtaatcactgtttaaaacatcgaccatttcagtccgcatgaaccgagccgtattcgccaatggtgcaaccgctagtgctaatgttggtaagacactagatgaccagccgtcccataacgcaattgggaatagttgtaatttaaaggcaaggaaaaattggagtaagaccgccaacacaaagttcggaattgaaatcccaacgattgaaaagaacgttgcaacgccatcgacccatgtattcttgcgaatggccgccactgcccctagtaaaatacccagtaatgagccgacaatcatcgcttgtgccccgatttgtaatgaaggtcctaaacgcgtcatgattaggctcaagacgggctgattgttgaactggaaggatgtgccaaaatcaccatgcaacaagccacctagatagatgaaatattgctgaattaatggtttgttcaaaccgtactgttcattcatgatccgtaattgatcagcactcattttttcctgattcgtatatggcgtccctggcatcaacttcatcatgaagaaggtcacagaagcgacaatgaatagggttagcactaaatagaatattcgtttaataaggtatttactcataagttcgctcctaacaaaaacgggcttcattgtttttcaacgctgaagcccatctttataaagtcagtttatttttttaaataaagtgagacattattgtagcttcctgaagggccgtagtctaaacctttaaggcttgggttagttaagtacgccacacctgattgatacagtggaatgacacctgactctgtattcataatatcttgtgctttaacaaggttttgccatcttgctttaggatcattggcgttgtcacctttacttgccttgatctgtgcatcgtattcggcattgctccaatggccatcattgttatcgccgcctgttacaaacaagtctaagaatgtgattggatctgggaaatcagcgttccaagcactaaccaccatgtcgaaatcaccgttcgttgaacgtgttaaacgagtcttaaatggcacgttcgctaatgtgactttcaaacctggtaagttcttttgtaaagtattttgcaaatattcggattgtttcttggcagtatccgtatcatcgccaagtaatgtgtaattgaatgttttgcctgtttgcccagtttcagcaaggccttcgttccaaagttttgttgcttctttagggttgtaacttgcatttttcttacccgctgcgtctaaatcatcaacaaaatccttcttagttgttgggtcaaatgacatattctttggtgtcacagaagcaattggacttgaaccatcacctagaacctgtgcgactaattctttacgattaattgtcattgaaattgctcggcgaatcttcgcatttttaaagattggattcttttcttggttgacttgcatgtagaatgttgctgatttttgtaaggttgagtaatgtggatcgtttttcatttgtttagctgtgtcaccactgatcgccgtccgatctaatttattactttggaagaggtttaaagctgttgatggatctttaaccacttgatacttcaacgtcttaaccttaactgctttcgtattccagtaattggtgtttttaacttctttccatgagctatctgggccattccaattttctaatttataagggccgttgaaaactaatgttttagaatttgtcccgtaactcttgccagctttcttgactgcttctggatattgggggaagaatgttgaactggtcatcaattgactgaagtatggaattggtttttcaagggtgacttctaaggtgtgtttatccttagcgactacacccaatgaattaaccggttccttaccagtcgtgatgtctgctgcatttttaatgccttcatagatataagcatattgtgaaccgacctttggatcaacgactctgcgccaagcataaacgaaatcttctgccgtgaccggttgaccgttgctccacttcgcgtcttttcttaatgggaatgtatatgttaaaccgttattagttggtttgactactttagtcgcaatcgccggtttaatttctttaccctcgtagcggtaaagaccttccatcgtatcggttaaagcctgtgcaccgatcacatccgtatttaacgctgaatccattgtcgaaatgacatccccagttgcaaaactggctgtgtcagtcttaacggcttccttgctacctgagttaccacaagctgctaataataatgtgaccgccactgttgttatacctaataccaaactcttttctcgtttcatatggacactcccttcagttattaaagataataatacatgattaaaaatgaaaagtaaataataaagattaaaatattctaatttattttcattgatacagagccattataagaatcattctaatattataacgcatccgcaaatgattattatgtgaataatctcattttcacaaactgtttaaaaaaataataagttgggagaaatcagcatgattcaaaccgtaacagaacagaacatcgcaagctttgttcaaacacaaccgttagtgattttagacttttgggcggattggtgtgcaccttgtcggattatgacaccgatgattactgaattacatgaacaattagctgatcagtttggcttaggaaccgttgatgtagaggatcaagcagcgttagctgaacaatatgcgattcaatccgttccaaccctattaatcttcaaaaatggtcaggcgacagaaaaggtaactggcgcttttccaaaagagaagttaaaaagatacttagataagaaaatcgctgaaatgtaatcagcgcattaatagtagcccgcaactttcattggagagttgcgggtcttttttgataagtagaaataaaataacccccttagctattgtctaagggggagatgattattgacgaaccatgtggataacacgttgataaaggattaatgcgccaatctcacaaagtaaaatcaaaacagctaatggaagataggtataactgcccatcacgccaactaatggggaaagaaaaatgccgaaaacatacatgccaagtccaagcactgaagaagcaatccctgcatgttgtccttggcgttgtaaggccagtgaggtgacaacggcattaattagaccaagtgttgcgaccactaggaataaaccaattaaagctaaccagagacgattagagccaaagccactaattaagacgcagatggcaccgattaaaccaccaattaagccgatttttaattgttgtaattcatcaaaccaatggattaaaatggtggacatttcagccattaagataatcccaatcccattgattccgtagattagactgaaagttgatttagaaagactaaagacattttgaagcatgaaactggaacctgaaatataacagaacattgccccataaacgaggccttgaattaaaacaaataggatgaatgggcgatctttaaaaatggcttgaataccaaggcgcgattgttgtgccgattgcgcgcttgtggatactgtgtgtgtttctttgaatcccaaaatgatgcctaacaatagaagaaggccaacaatccctaaaaagccgaaaatgccttcccaagaggtgaaacggagcaaagcacttcctattaatggtgaaatgatggggaagataccgttgattgccatgagtaaggcaatgaattttgtcaattgtttaccgtcaaataaatctttagcgactgctcgagtaatgacctgtcctgcagagctcgctaacccttgaataaaccgtaaaaggaagaatagccaaatattgtgggtgactaacgataatagacacgctgtaaaagcaagggcggttccgattacgagtggctttttacggccaacacgatcgctccaggcacccatgaagatggggccaatcgcaagtccagccaaacacatggttagactcagttgaatcatggaagcagatgaatgaaaatcagcttccataatcggaaatgctggtagatacatatccactagtaggggtccataagcactcagtgaaccaagtaaaacagataaccatagtgttcttttttttgttaaaaccatgttaataaaccctcctaaataaaaaagtgtaaaaaaatagcccgttgaaaacgtagctagcgccgaacgaatttaattaattactattcatgttgcttcttagttacactaacataagaagtcgggtttgtggcgatatatgagcaatttttaatatgtaaatggtttctatttcagtttaaacaagttatgatggagataatgaaaaaagttgtcgaatgaggttttgccatgaaaattgcccaaaaaaataaaatattagaaacctgcctaattgcgggacggattatgattgaaagtggttctgaaatgtaccgggttgaagatacaatgaaccggattgcttataatgcaggcattcaaaagagtgttgtgtttacgacaccgaccggtttatttatcggaattgaaaatcaaccttatgtgcaactaggcgctgttgcggtgcggacgattaaccttggaaaagttgaaaatgtgaatactgcttcacggcaatttgcgactaaggaaattacgttggatcagttaatgttacggttaaaacaaattgatcaggatacagctcattttccgttgtggttacaaattacagctgcagcagtcatttcagcgtttttgatgattattttttctggtgaatatgattggttagacatcataccgtcagcggtagccggtgctttaggctatgccgcctttgcggcggtcaatcgggtcacaacgattcgctttatcggtgaatttttaagtgcgacagtgattgggatagtcgcctatctattaactaggtggcacttaggagtcgatatcgataatattatcattggggctgtaatgccattggtacctggtgtagcgattaccaattcgattcgagatttgctagcagggcatttattatctggtatggcacgtgggatggaggccatcctgagtgcctttgcaattggaacggggattgcgctcgtatttagattctttatgtaaagagaggttcatcagatgccatattgggttcagtttattattcaagcgttatttagttatatttcaacggttgcgtttggaatttgtattaatttaccaagacgcgcattattatggtgtggctttgccggtatggcagggtggcaggtctattggatgctctttaactttggtagcgggcggatgcttgctaatttgttgggtgcgttagctgttgggatttgtggcaatattatggcccgttataagcggatgccggtgattatctttaatattccagggttagtgcccttagtgcccggcggaactgcgtatcgtgcgattcgaaacctcgtgctaggcaacttaaatgaagcttcgacacaaggtgttgcagtgatcatgattgctggtgcgattgccgttggctttatgttagcgcaaattttagccgatataacacgcaaacgagcgattacgccgaaatgggtatcgcgtcactaaaaagtatgctataataaggttatgcgatgagtcgagtaagtctcggtaggcaactattctgcgaaggcagctaggagacccaaagatacaggataccacggttattcatttaaccacttgccgtattgcaagggtgttttcgcccgctgtgttgtggagcacaaggtgtttattcttcggaatactgtaaaaaaagccccttccgtcaggaaggggcttttttttgtgcgttcattttcttgcatgacagcgttactgatggtgcgatggtcgactaattcaccaatccgttttagatgtttgagatgtgcatcgtagtgttccgaaaaaacgagcgcgtataaaacatttaataggaagatgatggaggtattaatggtaaagttgccgattttcgagtagagtttttcgcgggttgtaatcggtaaaaagcaagtgcattcttgcgaaagtcgattttcaccgatactggtaatcgcaatcgtcgggatgttgcgggcgcgtaaaatagtgttaagtgctagtaagttgggattctcgccagaataggaaattaaaatcgcacaagcatccggactaagattataggcatcgtagttttcctcgccacgaaccgcagatagcgtaacgtttttttggatacgattcattttgagggcaaaatcttgcgcgatgagtaagtttgagttttgggagaagatttgaatatgatttgccttgaggagcaatgatttagcttgactcagatggtcgtggtcgagtaaaaagaagatatcatcaatcgtcattttgtccaagaccgccattttcttacaaatagtcatcaaactatccgtactcgaaaagggcagattgggatcgatacgcgtaaaatgtttattgaggtagcgccactcttctagatagtgtttcttaaaagatttccaaccgtcaaaatggagttttttggcaatgcggaccagagtggacggttgcgtataggtttgagcagcaatttcttggatggaaagctgatcgagtgcttctggagccgttaacaagtaatccacaaccacggtttcagcgggggaaaacgcgaatgtctctagtttttctttaattaacatgtaaccgcctccttttacaaaagattagcgatatttgtaaaataagtcaatcgataccctagtgatttgtaaattaaattcgcgtttaggccattaatatcggcagtttatgcgaactcacttttaaacgagggcatagaggtggggtttgcggtttgcgttaggtatgcttaatttgtaaacaaatcaaaggaggcattcagatgacacggaaagtaaaaattgcaacgattggtggcggtagtagttacacgccagaattgatggaggggtttattaagcgctatgcggaattaccaattggtgaaatctggttagtagatgttgaagcaggcgattgtcggaaaaatggcgcaacgaatgtgggatgcgtccccgtatgatgttcagattcatacgaccttgaatcgtgaagaagcgcttaaagacgccgattttgtgaccacgcaatttcgtgtcggccaactggatgcacgggtgaaggacgaacgcattccattttcatacggtctattggggcaagaaactaatggcgctggtgggatgtttaaagcatttcgaaccattcccgttattttagaaattgttgcagatatgaagcgcctctgtcctgacgcatggttaattaattttactaacccaagtggcatggttaccgaggcagttttaagatacggttaatgggaaaaggtgattgtttgtgtaatgtgccggtcgccgctaagatgggagaggctgaaacgttaggtgtgccacagacggatttaatctataaatttgcaggggttaatcactttcactggcataaagtagccgataaaaaaggtcatgatttaacgccgcaattgattgataaattatatgaagaaaatagcgggttaccgaaaaatatttttgatgttcctttctatcgggaacagttacagcaaatgaacatgatcccgtgtggctatcatcgttattactatcgtgctgaagaaatgttaaagcatggtttaacagaatatgcgactgaaggtacgcatgcgcagcaggtgaaagtcattgaatacgaattgttcgagttgtataaagaccctgatttagattacaaacctaaacaacttgaacaacgtgggggtgcttattattcagatgcagcctgtgaaacgattgcgtcgatctatgcgaataagaatacagaaattgtggtttcaacgcgaaataacggggcagtccctgatttgccagcggattgtgcggttgaagtgacggcctatgttggtggggctggtgcgcggaatgttgcgtttggaccattgccaacagcagaacgtggttggttacagatgatgaaatcaatggaattgttaaccattgaagctgcgataacgggtgattatggcacagctttacaagcctttattagccatccattggtgccatccggtgaaaccgcaacgcgcgtcatgcatgaactactgattgcgcataaggcttacttacctcagtttgcagacactattgcacggttggaaaaagaaggcataacgattaaggatgaagtggttcgaaagatgtagtgatcatccaaaaaaggattggcgagcagcgaatcctttttttaatcccttaaaaggcgctataatctgtaaagattgatagaatggtagcaaggggcggttagtaaatgtttgaacttgaaaaaatccagcagttgaatacattggagctatcagttttaaagtatgttttaaatcatcgcgcacaggtcgaaaaaatgacgattcgtcagttggcgacccgagcgcatgtatcgacgtcaacaatctcgcggttttgtgagaagctagggtcgaggggttttcggaattcaagtatatgctaaagcaagagcggttggcgcaaaaaaagacatcgatgcctgaatatgatgtcatgttgccaattaccgagtttttggataaaacgaataacgaaacgttcagacagcttttatcacaagcaacggcattaattttagaggtacaagctgtctttttctttgggatcggcactagtggtgccctggctcagtatggttcgcgttatcttgccaacgctggtattttctcgctgagcatcaatgatccatttacaccggtggggatgcgagaaacagtcgtggcggataccttattagtggtgctctcggtgtcgggggaaacaactgaaatgctggcacaagttgagcaatatcaagcaggaaaaggcaaagtattggcaattaccaacagtacgcattcgactttagcgcggttagcggacgttgtgattccgtattatatgcctgaagaaaagaatggttccttgaataatacgacgcagataccggtggtttatattctagagttgctagcacatcgggttgcttgcgttcagtaagtgttgtttgaaacatgttatttttaagaaacaaataccaatcagtggtgcatgtgtttatcaccgttaaaggactagtcgcccagatggcaaagcgctatactgcaattatggaagcgcattctgaggcggtgatgttgatcaatcgccgtgattaaatagcgaagggaagttaaacacatgaatacttggattaatactaaattaatgccacctattatgaagtttgttgcgacgcggccgattacagcgttgaaaaatgggatgctatacgtgatgccatttacaatcgttggatcgattttcttaattttagccaacttgcctgttaagagttgggccgattggatggtttcaactggtttgaccccatattggaacgttgcctataacgcatcgtttgcaattatggcgttaatcgccgttgcggggattgcttattcttgggttcaggatgaaggttttgatccgtttccagcctcattacttgctattgtttgtttctttcttattagtgacgcgcccaagcactgccattgtttcggcatccggtaagattgttgtctctgttaaaatgatgagtcaacaaaccgggtttattgatcggacttggcttggtggacaagggatgattactgccattattgtcggtttactagtcggttggatttactcagctttcttaaaacatgatattcggattaaattaccagaacaagtgcctgcgaacgttgcaggttcctttaccgctttgattccagctgctgttttaattagtggctcactcttggtttatatcttcttcgacaaggttgcaaactcaaccttaacagaatcaatttacaataccattcaagcaccacttcaaggaattaccgattcatttggtggcatgttagccatttctttcttagtaccattcttgtggttcttcggggtgcatggttcaacaattgttggtgggattatggggcctttattgcaagccaactcactggctaaccaaaaaatcttgggttcaggcaaagcattaacgttagctaacggtggttacattgtgacgcaacaattacttgatcaatttatgacagttaccggtgctgggatgacaattgggattgttgtttacatggcattctttgccaaatcagcacaattcaaaaatttagggaaattatcattagcaccagcagtctttaatattaatgaaccgattttatttgctacaccaatcgtgatgaacccgattatgatggtgccattcttcgtgacaccaatgctatcagcaatcttaacgtggactgcgattcgggtcggtttaatcccaatgttccccggaacgttggtaccatggacgacaccaccaatcatttctgggttattagtgggtggttggaagactgcattgtggcaagccttaatgttattaatgacgttctttacgtacttaccatttattcggaaacaagatcacttgaactatgcttcagaacaaggtgcaacaactaaatagggggaaaggtcaacatgggacaacttagaaaagattttttatggggcggcgcagtggctgctcatcaattggaaggcgcttggcaagcggatggcaaagggattagtgttgatgtgatgactgccggggatgttaatcatcaacgggggattacagatggtgtacaaccggggcacaattatccgaaccacgaagtcattgatttctatcatcgttatccagaagatattaagttatttgccgaaatggggttcaagagctttagaacatccattgcatggacgcggattctttcgaatggggatgaagcacaaccccaacgaagccggccttaaattctatgatgacctatttgacgaatgtctcaaatatcatattcaaccagttgtaacgctcttgcattttgaaatgccatatcacttggtcacggaatacggtggttggcgtaatcgcaaagtcatcgactttttcttgaactttgctgaaacggtcttcaaacggtatcgtaataaagtgaagtactggatgacgttcaatgaaattaataatcaagccaattaccacagccagtttgccttatttacaaattctgggttacagattcaacctggtgaagatgctgaaaaagtgatgtatcaagccgcccactacgaattagtcgcgagtgcaaaagctgtacaaattggcaagcaaatcaatcctgatttcgaaatcggctgcatgattgcgatgtgtcccatctatccactgacagctaaaccagaggatgtgctcaaggcagaacgcgcaatgcaaacccgttattggtttgctgacgtacactgtcatgggcgctacccagaatggctcttacaatatcaaaagaaccaacactacgatttggacattaccgcagatgatttgaaagaattggctgcagggacagttgattacatcggcttcagttactacatgtcatttgcaaccaaggacaaaggtgaaacaacacttcattatgatgaagaacacgatttagtgcctaatccatatgtcaaggcatcggaatggggctggcaagttgatccagttggcctacgttatgtaatgaactggttcaatgatcactatcacttaccagaatttatcgtggaaaatgggtttggtgctgttgatcacgttgaagcagacggccaaattcacgatccttatcggattgattatttacgcgaccacattgttcagatgaaaaaagccgtggaagatgacggtgttgatttgatgggctatacgccatggggctgtatcgatttagtttcagcaggcaccggacaaatgtcgaagcggtatgggtttatctatgttgataaaaatgacgacggaacggggacgttagctcgttctaagaaggactctttctattggttccaaaaggtaatcgccaccaatggggatgacctagcataatcatgaatagcgacgcaggcaaattgattttgtctgcgcctttttttgttgaaagaagcccatgcattattaataacccatttttctgaaataaaactgttattttatcgtgagttaacattaggcaattaccattatgaaataaattatgagaattagggcttatctaatgcaaaaataatcactatcgtttacaataagtaagtattaaaaatggaatggggtaaagaaatgacaattacatatgtcgtcatcaacatcgtgatcatgctcatcatgttatttgttttaaacaagatggcccggattcacgttaagtttagtcgccgcgttttcacggcattgggggtcgggattttattcggcgcactcttacagattatcttcaaagcagattcaacggttgtcaaacaaacagctgattgggtcggcattgtcggcaacggttatgtctcgttcttaaagatgatcgttatgccgttagtcatggtttcgattattcaagccattacgaacttggaatcatctaagggcttagggaagatggccggcatggtcattggaatcttagtctttacaaccttaatcgcagccacagttggttcagtgacagcggatgttttcggcttaaatgcgagtgatattcaatcaggccaagtcgaaaaggcgcgctcgaaagaattacaaacgaagctaggcgatgtacaggaacaaactgttcctgaaaaaatcgttagcttcattcctgaaaatccattcatggatatgacgggttcacgacctacatcaacattagctgttgtgattttctcagctttcttaggagtggcagcattacaattacggcgtaaaaagccggaacaagcagaaatgtttaataaaatcgttaacgccttgtacacggttatcatgcgcatggtaactttaattttacggatgacaccttatggggtgttagccttaatgacaacgaccgtagcacaaactaatgttaaaggaattctcagtctaggtgagttcgtgattgcctcttacgtggcattaatcatcatgttcttgattcacttcctattaatcacgttcactgggttaaatccaatcaactacattaaaaaagtgattccaacgttaatttttgcgtttacgtcacggacgagtgcgggttcaattccaatgaacattgaaacccaaacgaaacgtttaggggttgaagatgggattgctaacttatcggcttcatttggggcttcaatcggtcaaaacggctgtgcgggtgtttatccagcaatgttagctgtgatgattgcaccaactgttgggattaatccttggagcatcggtttcttggttaaattaatcttgattgttgcaatcagttcctttggggttgctggtgtcggtggtggcgcaacatttgccgctttaatcgtgctttcttcaatgaacttaccagtcgggttagccggactattaatctcagttgaaccattaatcgatatgggtcggacagccttgaacgttgatggctcaatgactgccggggttttaacggctcacttattaggtaaactggataagaacaagtttaatgatatgagtttgacggaagattcagacgaaatggcttaatttcaaaaaaatggagggtttagtgatgcgaacgattattatcggtgccacagctgccggaacaagtgcagctgcgaaagcaaaaagaacgaatccagatttagacattacgttatacgaaaaacgggactatgtgtcctttggggcttgtggcttaccttattttgttggcgagcactttgaagatcccaaccaaatgattgcccggacacctgaaaaatttgctcaacaaggtattgatattgcgcttgaacacgaagtactatcagttgactttgatgcgcaaacaatcgtggttcgggatttgaaaaccaatcaagatcgcacagaatcttatgatcaattaatgttagcaacgggagccacagctgtgatgccaccgattaaaaatgttgatctaaaaaacgtctatcatctacggacgatggcagatggacaagccttacgtgaattaggacaagacccaaaggttcaatctgtaacggtgattggtgcgggctttatcgggttagaaattgccgaagagttccatcaattagggaagcaagtccgggtcattcaactagaagaccgaattttaccactggcttttgatccagaactaacggacatgttcgcggatgacttatgtgataacggcattgaattacacttatcagaagctgttcaagccttagaaggaactgttcaggtgactggcattgtgactgataaggggcagtatgcgacagacttagtgattgtagcagctgggattcggcctaatacgcaattcatcacggatgatcgattgaagaagttgccaaatggtgcgattattgtcgatcaagcagggcggacatcgattgaaaatgtctatgccgctggcgataatgcaacggtcattaacagcgtgacgaaccaaccgatgtattcagcacttgccactggtgccaataaattaggccgaattgtcggcacgaatttaggcgggcaagccgctcaattaccagggatgttgaattcagccggtgtgaaattaatcacgctagaagcgggccgaacaggtttgactgaaaaagaagcggcagaggctggtattgatttcagtactgttttaatccacgacaagaaccaaacgaattattatccaggccaatcagatttaacgattaaattgatttacaccaaagcagagcatatcttaattggtggccaggtggttggtcaaaaagacgcagtgttgcgcgttgatgtactcgcaactgcgatccaagcgaagatgacaactgaacaactcgggttactcgaccttgtttatgcaccaccgtttgcaagaacgtgggatgcactgaatgtggccggcaatgttgcccattaattaaaaaaaagtgacaccgcacaaaccgtgtagtggcgctttttttgttgcatgcttaaacagttgttcatagtgtttacttgaatgtttactcgggtctgtgctaaaattgcatttagaaattaaatttttgcaaagttagttatgaattaattacgatgattaagaaaacacaaataaaaaatttatcgacaggagacagtttaatgaacaacacaaagagtttgattgcattgagttctggaattttaggggcagctgggatcggtttattgagtgcagggcaagtacaagcagcaacgacagcaaccgtcaactacgcagatggtgcaacaactgtttggacaagtccaacaactggtcaaactgctaaacgatacatctttaagggccaatcagtaaatcttttagcatcacaaaagattggtgctgaaacatggtaccgaattgggaacggcgaatgggtacctgaacgttacttaacaaccagtgacgctacaccagctgaaacaacaccagcaacagaagcacctgctgctcaaaagacagctcggattgcctatgccggtggcgcaacaactgtttggtcaacagcaacttatacagccccaacaggccaatacttaggttatggtcaaaccgtcaacgttgtgaaaacagaaactgtttctggcgaagaatggtatcaacttgaaaatggcagctgggtaccagctcgctttacaggtgatggtaagattgaagccacaccagcgcccgttgcacaaccggtagcaccagcacaacctgcaacagcgactcctgtcgaaacaccagctgcgccagcaccagttgcaacaacaccagcgcaaacagaaagcacgcctacaacaccagcacctgtcgcagaaagtgaatcaacaccagttgaaacgcctgccacactagaaagtacaccagctgtagcagaaagtagtgcgcctgctcaagcagaaagtacaactcaaacacaacaaccagctactcaagaatcatcagctcctgtccaagaaactgcaccagttgaaacaacaccagccccaactcaaaaggcaccagttgtaacgacaccaacaccagccccaacggcacctgcagcaacgactggtaatgcgcaagctgttattaatttagcgatggctcaaattggtaaaccttacgtttggggtgcccatggtccaagtagttttgactgttctggattaatggactatgtcttcagaaatgctgctggtaagagtatcggtggttggacagtccctcaagaaagtgccggttatgctgtttcattaagcaacttgcaacctggcgatttattattctggggttcacaaggtagctcacaccacgttgcgctatacattggtggcggacaatatattcatgccccacaacctggcgaaaacgttaagatcggttcaatgcaatactatgcaccaagttttgcacgccgtgtcttttaatgattgcaattaagcgaacatctcacctaggtgggatgttttttgtattttagccctaaataagctatgatatgtagagatttaaaaaaggactgacgagatgaagatagaagtacaagcatttatcaatcaaattcaagatcaaacatatttaacggatgaatacgagctccccacgccagatccttttgtggcggacggtattttggcacagttaaaacccgctattgataaagccattgaaaaacaagctttggcctctttttcggtgctgacagaatatgctggcgaacccgttaaggtgacattggaaacggggattgtgaatctaccattacaatacattaaaaaagtaaatcaattttttgaactcgacgaccaagcagaggtgaatctttatttatatgtgacatcgccactcattaatcgctcgaacatgcggattgacttaattgggacggtagcttcgtttgaagaatcggcagctgctaattggacgaagattgccgacttgctaacaaaggacttggaagccgtcgtaatcggttcacaggcgcctaaagaagaaccagtcgaaaagaaggcgcccgctaagaagaaagccgcacctaagaaaatggcaacgactaagaaaaaagcgcctgccaagaagacaacagctaaaaagacagctacccaaaaaacaacgactaagaaaacaaccaccaaaaaaaagactacgaaaaaagcagactaatttagtctgcttttttgatggcgtctattaaaggcaagtcgccgttaacaaacgagaatttcttgtggattgtttcggtcggatgttctaagacggtgcaaatcatcgcagcgacatcagcacgtgcaacttgtccaccagatggttgcattgtcactaggccggtagcttcgtcgtttgtaagtgtcccaggacgcaagatggtccaatctaaaccagagaattcaagccagtgatcggcatagtattttgcagcgtagtacggtttaatactttcaggccatttagttcgatcctcaacaaaaagtgcactgaccatgacgtagcgactaacttcagcaatcttagctgctgccatactcttaacggcgccatcgagatcaaccaacagtgtttgatcatcgcctgttttaccgccagaaccagctgtaaagacaatcgcatcatgatcggcaaatagtggtgctaaagccttaggttgtttggttaaatcgaataagacaggcgtggcccctagttgtgcaagttcatccgcctgttgttcgacacgaatgccggctgtaacggtgtgaccggcagcaacgagttggctaattaggagctggccaacgttaccatgggcgccaataacaaaaatccgcatagtaaaacctccaatataaatgtgtgtgctgtccattatagtagttattgaacagtgacgcaaagatagtggatttaaaaacctgtgttgtagtacaataaaattcggcaccttgcgaaaaaatgagtgtgctttagggtatataatcttgaaagtggctgatggcaacctttaaataggcaaagctaattgtgggattcgttttagaaataaatctaagaatcctctcattttttcacaaagttgcttattagaatatcatgaagccgtgtttgttttgtgttatggtacagatatagagattgtgatttattggataagtagtcctatttgttaatgctatctcagaaagtaggaggagaacatgacaaatcaatatcggagcgtttttgatatcattggaccgattatgattggtccttcaagttcacatactgctggcgcagttgccattggacatgttgctaatcgtctttttcatgcaccgattaacaaagttattgtgcgttactacgaatcttttgcacaaacccaccaagggcatggtaccgattatgcaattattagtggcgtgctaggattcgatccggctgatcaaagggtaccaatggcagttgatttagcgcgacgtcaaggtattgacgttgtcttcattgaagatccagggaatagtccggtgcaccatcccaatacagcggaattaacgttaatcaatcgtgagaaggaactaacgatttggggctgttcaattgggggcgggaccatcgaaatccgccaagtcaatttgaatggcattgtgattaaaacggatggcccgttaccattggtttttgtcgaatcggaacaagaaatcggcgatgctttagaccagatatttgaaggcaactatcgtgataagcgcatatcggttaaagtgccagatcggtttttgtataaaatcgaactgattgataagccgtacccggaacagattgaacaggtccgcggaatgagccaagacgttattgtgttatagaaagtggtgggaagatgtatacaacaattcacgaattagtcgagacagcgcaagaacggcaactaccaatctcggaattgattatcgaacaagaggttgcgatgagtcacactagtcgtgaagtcatttgggcaaccatggggaaaaacttggatgtcatgattgcggccgaagaaaaaggcgtgaccggtgaaggtgttcagtctgccactgggattacaggtggtgaagcggttctgttgaagcggtatcgggaaaagggaaagtcgttatcaggtgatgtgatgttgaccgctatgcaaaatgcggtagctaccaatgaagtcaatgcttcaatgggaatcatttgtgcgacgccaactgctggttcagcaggtactttacccggtgttttgtctgttattactgagcgcttggcgcttgatcgggatgcgcagattcggttcttgttttgtgcgtcagcctttgggatgattgttgccaataaggcgatgattgccggggcaactggaggctgccaagccgaagtggggagtgctgccgcgatgggcgccgccgctgcagttgaagctgctggtggcacaccacaacaatcgtcggaagcattcgcgatggcgatgtctaatctattgggattggtttgtgatcccgttgctggattagttgagataccatgtgttaaacgaaacgtgattggggccgtcgatgccttgaccagtgctgatatggcattggcagggctaatcagcaagattccagctgatgaagtgattggtgccatgaaacgaatcggtgaagatatgccatctacattacgtgaaactggtttaggtggattagctgctacaccaaccggggttgcattgaagatgcaaatctttggtaaggataagagccttaaataaaagcgacttttaggaggaacaattatgcaaaagaaactttcaaaatccgcatacggcggtgtttcaggtgagaaatatgtaccgtatgtcaaccaaggcgacaaaaaggtcggcaacttagcgattctaataatggggagcattttagccattatttttgctgcttcaacagcttattctgggatgaaggccggtttaaccgttgcagccgggattccaggttcaattattgggtctgggttagtcggtgcctttgccaaatcaaaagggattttaggcaagaatattatgcaagggatgtccagtggtggtgaatcaatcgccagtgggatgatttatgttttaccagctattattttaattggtggccacatcaacttcattcaaggggtcatcgttggggtgctcgcaattcttttttcaatggggacagcctcattagtgcacaactacttaatggttgaagaacatggtaagttggtttatccagaagccatggcgatttcagaaaccttagttgcgtcagatactggtggcgattcgcttaaatacatgggtgttggctttggtatcggtgggattattacgatgctaacttcatcagtgtttggtgtcgtcaacaacatgattagctacgttggttcatcattttataaatggaaattagacgttgaagtgaatccattacttgcaggaattggttttatcgttggattagaagtgtcattaacaatgtttgcaggtgcgattttatccaactttgcgattgcaccgttaatcggttatttcacagatatggcgggcaacagtgcgcatgtttggaataacacgagtttagccgtgaatcaaatggccgttaacgatttatcaagttcatacgttaaatacattggtgccggaatgatgctttgtggtggtttaatcggtgcgattaaattaatcccaaccatcgtgacgtcaatcaagaaaacactagctgccaaaaacgtagcaggcgaagaaaagaatacgcttggtatgattgccattgttgttggtggtgttgggatcttcgttattggtattatcattgcgcaaaacttcttaatggggattgttggtgcattactagcagccatcttaagtttactctttgtcattgtttcggcccgggttgctgggacgattggttgttctaacttgcctgtatcagggatgacaattgcgtcattagtgattatgacggtagtcttcgtattatttggttggacggacaataaccatacgcaaatcttattaatgttcgggacattcgttgtgaccgccgttgctgttggtggtggctacatgcaatctcaaaaagtaacatatgtcattggtggttcaaaatctgaaatgatgaaatatttcatgattgccgggattgtcggcgtaatcgtaactgtcggcacaatcagcatcttatcaccacaattcgttacagatagtgcaacaccagcctttgggttgccacaagcgaacttaattgctacattaacatctgggattatgacgggtaaattaccatggatcatgattatcgttggggttgtgatggcattagctttctacttcttagatttaccaatcatgaccgttgcaattggtttttacttaccaatttcaaccacttcaatcatcttgatcggtgctttgattaaagtctttattgaaaaagcaacgcgtgatgaagcgattaagaataatcgggttcaaagtgggattagtttatcatccggtttaattgctggtggttcaattattggtttaatcgggattattctccacgtaaccggtgtgttaaaagaccgcgtgattactggttttgcgaataccaatgcaatggggattatcttattggttgtcatggttgtttcgattactgtgccacttatgatgattcataaaggaggggcaacagaagatgggacgacagaaagcggagattgatttagaacaactcatctatgaaaaaaatccgcaagttcagtttaagttacaagctggccaggtcaccattattcggccgcagaatcactggattcaacggacattacggcgtttgcatgtgaagattccgctagaaacacagctggaacttgatgattatggtagttttgtctttaggcatgtgaatggaaaacgcagtgtccaccagattggccaagcactggcaggacagtatgatgaagccggtgaatacctgtatgaacgattactcgtgtatttgaatcatctagaacacacagaacatttgatccggcgggtaaccgactaagttttattaatcaattagtgaatcacatttttaagcttaaagtttcgtccaatatttggggttcacttcactcaacctctttttctatgcattatgatgatcacttgtttgtgtgatttgattaattttcgcgtgtaattcatggacttcagcttccttatctgctaacgctttatcaaatgttctttgattctttattttttctgcttcaaccgctgctttaatttgagcagcttgattgtcgcgtaattcagtgacttctttggtcatttccttttgtgctttccgttggctcaacgtgctgccagtcgctgccaagaaggtaatgatggcgccaatcaataatgacaccaaaataacgatgattaatggccatttaacatgggtgaatccaaagttaatggcgactggttcaacgtttaaaacagcaaaaattacgacaattaatgctaggaccaatactgtaattaatcgaccttgttttttcataaaactgccccccccctacttcttattcaataagttaccggcaacatagtctccgatatgtggtgccagttgatagaattgtgcaccgatcgccatcaaccatggtgcattaatttcacgttttgcatgcccgattgttttcacaatccgataagctagttgatcaggatctaaaacaacccaatcgaccgatttcaaataattaccggtcttatccgcaatatcaaagaaagctgtatcaatcggcccaggattaacggtagtcacttgaaccccaaatggttttaattctaagcgtagaccatttgaatagccaacaaccgcgaacttagttgccgaatagatggccgacttaggcgttgccatcttgcccgccattgaagcaatgttaatgatgtggccgctaccttgttcaatcatcatccgcccaaaagcgcgcgtcatgtacattaaacctagcacattaacccggaacatctgctccacaacggtcatggatgtgtcgaatgcattttcaaaacttccaaaaccagcagcattgactaacacatctggaatcccgacttcagtttgcacctgagccacaatggtttcaatcgctgctggatcactgacatcgaggacatatgcatacgccggctgtcctgaaagccggtgtgcttcttcgcgaaccgccgccaattcagcttctcgacgggccaaaacgacgataattgcccctttactagcggcttcataggcaattgctcgtcctaaaccagacgagccgccggtaatcaccacaattttacggtttaaatctctcaatgctgctaatttagtcatctgtttactcctttcgaccatgaaacggaatgtcatagatatctaagtcactaactactttcgtgtttttaaaaatatcgcgggcatcattttgtaaatcacgcactgcttgcccgaggtaccgggcagaaatatgggtcaataataaccgcttcacatgcgcggcttttgcgacctttgctgcattaatgttagttgaatggaaatattgacgcgcaatcttttgttcttgcttaccaaaggtcccttcatgcactaatacatctgcattagccgctaagcgttcaattggtggacattggcgggtatccccaataatggtcacaatccgtcctttttgagcatgtccaatgtaatctttgccatcaatttggcgcccatcagcgagtgtaaccacttctccctttttaatctttgcgtatacaggaccagccggaacaccatctgcatgcagtttctcaacttgcagttcccccggatggtccttttcaataatccgaaacccataactggcaatccgatgatccaatttagcacattcaacccggaaagtcgcatcatcaatcaaaacaccttcttcaggaagaatgacaaagttcaatggatacgttaaatgactttcagagatttttaaactcgtgcgcacgtattcttcagttcccttagggccgtaaatcgtaagtggttcgtcgccaccttggaaagatcggcttgataaaaagcctggtaacccgaataaatgatccccatgtaaatgtgtgagaaagatctttttaactttgcgcggttttaatgtcgtttttaagatttgatgttgcgttgcttcaccgacgtcaaacaaccacacttcatttcgttcatccaataatttcaatgcgacacttgtgacgtttcgttgtcgtgctggaactccagcgcctgttcctaaaaattctaattccatttagctcttccaatctgtctttaattcaacgctttattttgccgcgagggctttggtaataatggcggcatattcattgaccccagttgggttcggatgcaccttatcttggtagaaccagtcactgtgtttggcagcctgtgaataccaatcaatcaccgttaagtttggatactgtttagttgcatttttaagcgtctggttaacatcattttgccaaggacgcgttgggacaaacgcgttgagccaatagacttttcgcttagtcccaatggctgccataaattgcgccatctgttcttgcgtaaaggcgccatttgttcctagactgaccagtacagtatcgctaagggcttgtttttgatcataatcttttacaatttgaatactttgatagagttggcgcccaacagccgcatcaaccaacatattcgggaataacttctgtaaagcttgactaccgtcgagtaggacggaatcaccaattgcagtcaccgagatattctgggcccgttgaatcgtcacttgactcaagccatatttttcaaattcttggttgattggatgcttttgcgcagccgcctcagccgctttttcagcttttgaagttggaccatttgcttgtccagatttattctgggcttttgcttttttaatcaacgcatccttacgcttttggttagctttttgattttgcttaatattgaccgctaatgccgatttatgcgtatctggcgccggttggaatggcgcttgaaacgccccgactaacccgattaaaaagacaattgcgagtccagtcactcgaccaaccacccgattccaatgtggttggtgcataaattgcttcaattggtgccataactgcttgtacggatagtgtgctagtggctgttcaataaaccggtaggataattcggtcaatccgaaaataatcgccacttcaatcactggatataaaaccgggtgatcagcgatatttttgaagattatttcaaagaaaatcatcaccggaaattgatacagataaatcccgtaactccgtttacctaaccagttaaagaccggattcgtcaataaccgattccaatcagcgcctggatgagcgacaactgccactaaaacacagactaaagcactaaacagaaatagtcccccgcgatagacaagactactctcggcattcaacttaaccattaaccaaaccaaactgaggacactcactaacccgatgccatcgaggacgaggcgttgtttaggcacaatcttttgcttaagggctgttgatggccaaacaaacgccagcgctgctcctagtaaaattgaaaagacccgcgtatccgttccataatacaaacgactagggtcagcattgggttggtacaaaatggccatccagattgctgaaacaacactgactgctagtaatacttgggcaatccgatttttattcttaagaccaataatcaaggccacaacgataaaaggccaaattagatagaactgcccttcaatcgatagtgtccacagatgggtaaacggcgactcattattggcaaaccgatcgaaatacgactgaccatgtccaatttgccaccagttataaacgtataaaatgttcgtgataataatctgattaagttgctgtaacatttcccgctgaaaaagcgtgatgtacgcgcccgttgcaaacagcatcgttatcagcccagggtacaatcgttttacccggcgtaagtaaaaactttttaaattaatccattgattttgttcccactcttgaaccaacaaatcggtgattagataccccgaaaccaccatgaagattgggacccctaaataaccaccggtaaaagtatatggcatcagatggtataaaataacaccaatcacgccgattgcgcgtaaaccatcaaagccagtaatgtaacgactattctttaaacgcttcttgcccgccattttttcaacctactctacattctaataactgctattataacaatattttagtgatgtgcctacattaagccctgttattttatgcatcccatagaaaaaggaagcattcaaaaatgaatgtcttcctttcttgacgtgcctattattcgacaaattcaaacgtaaagttatcaattgccactaaatcaccatcatgtgcgccactttcgcgtaaggcttcgtcaatccccattgaacgtaattgacgggcaaaacgcatgacaccatcttgatgatccaagttactcatcttgaagagtttttcaaccttgtcaccagacacaataaacgtgccgtattcatcttgttcaatgatgaaagcaggtgcttccggttgatattgataaagtttttgcgtttgaacttcttcgacgtctcccattgggaattcagtcgtttcagctaataagtcagctgtcttgttcatcaatgattgcaccccttgatgcgtgatacttgaaatttcaaaaatctcatgtgtatcgccggcagctgctaatttttgtttaaactcggctaataattcagaagaacctggtaaatccatcttagtcgctacaatcacttgtggtcgttctaagatttttggatcataggtctctaattcgtgattaatttgttggtaatcttcaaatgggtcgcgacccgtttgatcgtccatttcgattaaatgcaagacaacccgtgttcgttcaacgtgccgtaagaattgaatccctaaaccaacaccgtctgaagccccttcgattaaccccggtaaatcggctaagacaaagtcccgaccgtcatcgagttgcaccatccctaagttagggaccaacgttgtaaattggtaactagcaatcttaggtttcgcacttgtcaccactgacaacaacgttgatttcccaacagatgggaaaccaaccaacccaacatcagcaagcacttttaattcaagttgaatgctgcgttcttcaccaggttcaccgttttcggcaacttccggcgcactattacgggcatttgcgaaatgcatattcccacgaccaccacgaccgcccttagcaatcactaattgttggccatcttcggttaaatcaccgagtaattcattggtttcagcatcgcgcaccgttgtaccaggtggcacttgaacaaatgtatcctcggcaccgcggccgtacatttgtttattctgaccattaccaccactattggctttaaagtgatgacggtaacgaaagtccattaatgttcgtagaccttcatctaccactaaaatgacacttccgccccgaccaccatcgccaccggctggtccgccaagtggcacaaacttttcacggcgaaatgcaactgcaccatcgccgcctttaccagctttcacatcaattttgacttgatctacaaacatattttgactccttctcatcgttaaacagtaccttatatactaccgaaaaaaagattaaaagtaaacagataactggttaaacactgaattggctctatcatcgataaaaagcgcactgagtgagtgacctcaatcagtacgctttttattcgttaattaatggctagctggcaccaatttaaattggctccatggtttcaaatagtctaataggaataattctgtaggcgtaatacggccaaccacattcacgcgcccgtcatttggcatggctttgagggcaatttgggtttcccctttatactgaccgtaaccgacgttatcgattaaaatatcaccgtgttggatgtcaactgtatggtgggctgggaaaagcaggtctttaaaaatgacccgtgtcatcgttgaccgtagaagatattctgaacgatcgccacgataactatgcagactttcaaagaggaccttgcgttcatcagccgtaatgtcatctgcgacgtcgattgcgattgctgggaattcagcgttaaagacgtcatgcatcgtcttcaattctgcttccgaagcatacgcattaccgacaataatgtcatcaatgttatccattaaaacgtaatgtttcatctgcgttgccatcgttaaatcgcgatcaacttccatcgtgggcaacccatcttgtgttggccatggtccgaaagtcgcttcatgtgaattgacaaacgctgctgtattcaaattgtattttgcaaattgcgccgtacattgtttgaagaagtcttcacctaatcccgagaaccgatgtggatagaagttatgacaacctaacaagttttctcgtttgggtgaataactcataatgttatcaacgtaacttgtcccttgactcatattaatttcaatttttaaattaaacggattgcgcgtcatttccgcttcttcttggccggtaaaaccgttgtccaaccgaattccccaagcaccaagttcatggaaaaaacttaaattatcatatgaaataccgagttgcttgaacaaacccggattgatatcaatcatgacttgcattcctaattggttggcatgggctacaacccgtttaaagttgcctaacacggcttcttgatcgccagacacctccaataatgatgtaaagacgcgttggaacccatattgatgcgctaaatctaagtaagccgcatccttttcaaaagttgatcgttctggataaattgaaacgcctagttttcccatgaatagaacctcctaataattgggctataccaccctgtcatctattagtctagcataccttaagcacttttgaaaactcttacattacttttaaactggtctatttctggcattgtccgcagtttgctcactaacgcaccaatctttttttcggtctatatcagcgttttgatggtttttgaacgtttttgaaatatttcgattgcttttgaatggaaacgatgtcataatgatgctacggaggttttgtcatgttaacagaagaacgtcaccaagcgatattacaacttttaaagcaacaagacgtcgttaagatgcaatctttgtgccagttattgaacgcttctgaatcaactgtccgtcgtgacttgcaattgctcgaagaacaagggcttgctactcgaattcacggtggtgctaagcgcatcaacacgttacaagaagaacttggccagattgaaaaaaacggcaagaacgttcatgaaaaaaacgcgattgctaagtttgccgcagcacaaatccaacaaggctgcgtcatttacttagatgctggcacaacgacccaggcaatcatcccctacttaagacctgaaatgaatttgacggtcgtcaccaatggggttgataccgcttctctcttagccgatcaccaaattcaaacctttctattaggtgggcgtgttaagagcaaaaccaaagcgatggtcggtgcggctgctttagaaacccttttgcaattccaattcaatcaggcgattcttggcacaaacggtatcgatgttgaagctgggctaaccacccctgatccagaagaagccactctaaagcgctttgcgattcaacaagcgaaccaaacgatggttttggcggatcacacaaaattcgacgctgtttcgttcagtaagtttgccccattggcacaagtccaattgattactgatcaattgtcaccatctgtttacaaacactatcattcacacacagaaatccaggaggttttatcttgatttatacgattacggcgaatccatcaatcgattacgtcattcaacttgaaaaactaaataccggtaacgtgaaccgcgtccaatctgacgttaagctccccggtggtaaagggattaacgtttcacgcatccttgccgaattagcattaccaagcgttgccctcggctttgtcggtggcttcactggtcaattcattcaaagcaaactcaacaacgcttcgatcgactgtcgattcactgaagtcgaagaagacacccggattaacgtgaagttaaaagacaatactgaagaaactgaaattaacggtcaaggcccacacatttcagcagaagccgttgccaacttgaaacaacaactgactaagctggaagccggcgatattgtcttcatgtctgggagtttgccacctaatttaccggctagtttctacaaagacttaatcccattgattcaagcgcacaacgctgaatttgtaattgatacaaccggtcaagctttgttagacacattggctgaaaaaccattggtcatcaaacccaaccatcacgaattggccgaactgttcgacacacactttgccaaccaaagtgaaatcatcgccgctggtcgcaaattattagaccaaggtgcccaacatgtcttggtctcaatggccggtgacggcgcccttttaatcacaccagaccacgcttacctcggtagtacacctaaagggacagtgattaattccgttggggctggtgattcaatgatcgccggttttgtcggcacattcgcacaacatcacgatgcactcgccgcttttaaaacaagtcttgcttgtggtagtgccaccgccttttctgaagatttagccactagcgctaagattaacgaactcttacctcaaattgaaatcacacaagttgattaattttaaatacaaaggagatttattatgaacatccaagatttactcttaaaagatgcgatgatcatggatttacaagcaacgactaaagaagccgctgttgatgaaatggttgcccgctataaagacatcggtgttatcacagatgacgccctctatcgtaaagatattttggctcgtgaagctcaatcatcaactggaattggcgaagggattgcaatgccccatgcaaaagacagtgccgttcaacgcgcaactgtgctattcgctaaaagtcaaaacggtgttgaatatgacgcactagacggccaacccgtttacttgttcttcatgattgccgctccagaaggcgctaacgatacgcatttacaagccttggctggtctttcatcccttttaatcaacccacaattagtcgctgatttgaaacaagcccaaacaccagaagacgtgcaaacgctctttgctaaggctcaagctgctaaagacgcagaagatgcgaaggaagaagctgaagaagccgctaaagcacaagccgcagccgcaacgccagctgatgatcaaaaaccattcatcgttgctgtcacagcctgcccaactgggattgcccacacttacatggccgaagctgccttgaaagaaacagctgctaaaatgggcatcgacattaaagttgaaacaaacggttctgaaggcgttaaacaccaattaaccgctgacgatattaaccgcgcaacaggggttatcatcgctgccgacaagaaagtcgatatgcctcgttttgatggtaaacatctcttgaaccgtcccgtgatcgacggcatcaagaaaccagctgaattgattcaaaaaacattggatgaagaaggctcaatctatcacgcaactgaaagccaatcaagcgaagaagcttcagctgacaagaaaaccctttggagtcgcatctaccaagatttaatgaatggtgtttcaaacatgttaccattcgttgtcggtggtgggatcttgatggccatctcattccttttggaacaaaccgttggcgcacattcaaccacttttattttcttgaactcattaggcaataatgcctttaacttcttaattccggtccttgctgcttacatcgcgatttcaatcggtgatcggcctgccttaatgcccggatttgtcgggggctacatggctagccaagcaacagccagtgtccttgcttcaaagagtccagccggattccttggcggtttagctgctgggttcatcgctggttgggtgatcgttggtttgaagaaagtcttcaagaacttgccacaaacccttgatggtttaaaaccaatcttaatattccctgtattaggactattgattgttggctttattatgtacttcatgatcaacccagtctttgctcaaattaacctctggttgagtaccttcttaacacacttaggggctggtaacgcattactacttggtgcgattttaggtggcatgatggccgttgatatgggcggtcctttcaacaaggctgcttataccttcgcaatcggtgtcttcacaaccaccaaagatggttcattgatggccgctgtcatggctggtgggatggtcccaccattggcaatcgcggttgctgctactattttcaaaaacaaatttaccggtagtgaacggaaacaagccttcgcaaactatgtattagggatttcattcattactgaaggtgccattccatttgctgcatcagatccgttacacgtgattgtttcaagtgttatcggttcagcaatcggtggtggtttaacccaattatggcaaatcactgtccctgcaccacatggtgggatcttcgtggcaccacttgccaaccacggcctactctttgtgcttgccgtgttaatcggaacatttgtcagtgccctaatcttaggcctctggcgtccagtggcaaaagaagcttaatttaaaaagtcgtagtcaaatgactgcgactttttatttatcttgaaaatcagtattgtgcttttgtttccattcattaatgtaattcaaacgttgtttcatccgcgtttcattgccttgttcggtcggccggtaataaatatggtcggcgatactctctggtctagttggcatcgtggtcaatctatcatcgtagaaatgtgcgagttgatatcctttgccgtaaccgacttccttcatcaatttcgtcgccgcattacgcaagtgcaatggcacgggttcatcaatcgtctttttaatatccttttgcaccgctgtccgcgccttataagtggcgtttgatttcggcgcaagcgatagataaatcacgcactgtgttaaatgcacgtcgcattccggtaagccaatcgcctgacaagcttgaaagacgttcattgctaaattcaatgcattgttatcggccagaccaatgtcctcactcgcaaaacgaacgagccgccgagcaatataaatcgggtcttcgccgccgtcaatcatccgccccaaccaataaatcgctgagtcgacatcactattgcgcatcgacttatgcaaagccgaaataatattatagtgttcctcaccgtctttatcataataggcggtttttttatttagcagttcccccaatagatcgccatcgacggtcacttgatggtcttgcacatcactattaataactaacatttctaaaatattcagcgccgtccgtgcatccccattcgaaaagatggcgacttgcttcaataattcatcactgatatgaaccgttaaatccgggaaggcttggggcgcctttaaaacccgttgtagcaactcaataatgtccgcttccgtcaattgctttagcacaaaaacgcgtgaacgtgatagcaacgctgaattgatttcaaacgacggattttcggttgtcgcaccaattaggataatgctgcctttttcaacatacggtaaaaaagcatcctgttgcgccttgttaaaccggtgaatttcatcaataaagacaatcgtccgctcacccagttggcggttttcttcggcttcattcataatcttccgaatctctttgatcccattcatcgcggcactaaacgtgataaatttcgaagccgtcttgcgcgcgataatctccgccaacgtggtcttcccaacgccgggtggtccccagaaaatcatcgaagtcacttgatctttatcaatcatttcgcgtaaaaacttgcctggtccgactaaatgcttctgaccgacaaaactgtctaaatcagacggtcggacccgattagcaagcggcgcattcatcgccatctcttgatcaaacaaagaggtttgtcccattttttcaccccactttagttgttgttaattgaaacttcttaaaatgtgcccgtaaataacttaaggttaaactctccgcgtctgaggcaacaagctcaaatggtgcacccatcgccatcacttggcccccttgactaccacctttaggccccaagtcgatcaggtaatcggcattggtcatcaaatcaaggtcgtgggtaatcatcataatggtggcacccttggattttagctggttgatgacgcctactaaggtttcaacatcgcgcggatgcaacccaacagaaggttcatcgaagacgaataaagtgcccgcccgttttttattcaaatgcgttgcgagttttaagcgctgtgcttcgccacccgaaagactcggtgtactttcaccaaggtgtaaataagctaagccaatttctttgagaatcttaagttccttttgaattgctggcacatctgcaaagaccgggattgcttcttccaccgataaagccaatagatcaacgatgctatagccttgccacttgatggcttcaatctctggtttgtagcggttaccatgacattctggacaggtttcttccatgtctggcaaatattgaatatccaaaataatgctgcctaacccaccacagttcggacaggcgccttctttattgttatacgaaaagtgcgcgatcccataatgatgcgcttgtgattctggtaaaccagcaaataatttccgcagattgttcatgatactcgtataagtcgcgagtgttgagcgtatattcttaccaaccggcttggcatcaatgctgacgactgacgttaaatcggtcgtcaactgggtgccctgctcgggtaattgctcatgttggtggtgcgcttcaattgctggcactaaactatctagaatcaaactcgtcttcccggcgccggaaaacccagaaaccgccgtaatttggttatctggcactttgattgtgacatcatgcagattaaaatattggccaaccgtcatcgttgtctgctcaccagtcgttgcggcagtgactttaggatataagatgttcgctcgaccagcgatatagtggccaatcagggactgtggattctggatcaaatccgcgggtttcccttgggcaatcacttgttcccctttgcgcccagcttctggcccaatttcaatcacccaatccgcttgactgatgatattcacttcatgatcagctaccactaacgaattgccttgtgccactagctgccggaaaatatgaattagcccttcgacgttgtcaggatgcagcccaaccgatggttcatctaaaacgtacaacacaccagttgtcgctgttcgcaacgtccgcgccaattgaatccgttggagctcgccagtcgacaatgtattcccattgcgcgacaacgttaaataatccaaccctaattctagtaacggttgcagtgttcctaataggttcttaaataaaattgtcgccatttgctgcatttcatccggtaagtcggccttagtagcacgcacccaatcttctaatgcgcctaacgtcaaattagaaactgctgcaatgttttgtccgccaactgtttgggtcagtaatgccggatttaaccgggtcccatgacacgttggacaggttgaaaaatggaaaaatgaattgactttagccattgcccgatcacttttaaccgattttagcgattcataaacagcgtcataagcattttcatagagggtattctccgtactaaacacacggcccgttgaggtatggaaatcaaccgcatacttcgcccgtttaccatgcaggacaatttctttttccttggccgtcaagtccttgtaagggacatcaattcggaccccaatgtgggcagcaacggttggcatgaaattccggcccggcaatcgccatgaggcaatcgctccgtcttcaatactgagattttcatccgcgatgattttgcgatcatctaacgtttgaatctgccccgtcccatgacattctgggcaggcgccagctgaattaaaggcaaagtcttcggccgatttagccataaactgcacttggcaagtagggcacgtaataatccccattttatcgccagctaagtccatcgcttgggcaatttttagacttggttgaatcacgtgcccatttggacaacgtgtcgtccctaaccgtgaaaaaatcaatctgacgacattaaaaatctcactcatcgaaccaacagttggccgttctgatggcatacttggtcgttgccgaagtgcaatcgctgatggaatatgccgcacttcttggacttgtgagcgtttattctgcgtgattcggcgccgcgtgtacgtcgacaacgcctctaaataacgccgtgagccttctgcatataaaatccccatcgcaagcgaactttttcctgaaccagacggtcccgaaatcgccacaaattggttcaacggaatatcgacgttaatatttttcaagttattgacgttcccgccacgcacttcaatctacgttggttgttcaattgtcattattggttcgctccccttttgcttgacggttaaaaacggccgcctctgcttctaaattcgctaaaattcgttctaaatagccgtcaacagctgccacttcagcatccgaaaagcccttgtaaaaaacggcgctcaatcgttgactaacgtcatcaccgacctgttgctgattagcgccttgttcagttaagtcaaagacccgcttgcgcttatcaagtggcgattgctcactcatcaataatccctgttcttctaagcgccgtaacatcaacgataaactactattggctaagccagtcacttgtgccaattccgtagcagtttgcggatgatgatcccacaatgctgacaaaattttcccctgttcagcgttatagcacgcgcgtggatcagccgttaaataacgattaaaaagtcgggtatttaataagcgaatcttcaaagttaaataaccaccctttttggttttcatcccgtccactcctaaattgtttttatatcagcattaattatatcttactatataaaactaattttagcgagtaaaaaacaccatggtcaaccacggtgtttctaaagaagctgtttcaattgttctgcttggacactgcggacttcttcgactactactagcgcctgcttgtcaatcgttgagaccaccggtacgagcgtcgcgagttgtttggccgtacaaatgacatacagcatcggccggtcattttgactatagtacccttgcgctttaatgatcgtgatgccttggtggaattgcgtcgacaatgtttgggcaatcgttgcatattgatccgaaataatcgtcaccgcgcgttttgccccaaatttagccaataatttattcaaaacgactgctgataaatacaattcaataatcgttaagagcatattttggaagccgataatgaagccggatggaatggcaacaattaaatcaaaaaaaagcatcgcagagccgttttggatccctaaatagcgattggcaatcttcgctaagatcgtactaccagcaatcgtcccttggcaatgaataataatcgccattgcaatccccatcaagacgccaccaattatcgtcggaatgatcgtctgtgtcgtatggtagccgataaaatgcgggagccgcaagaagatagaaatccagagtaccgcccagaccgaataccagatggtttgcttctctaaatacttaaagccgacaatcactaataaaccgtttagaaccaaattcgtagcagctggcggaattgctaacgcatagtagccaatcgccgttaagccagtcacgccaccttcaccaatatgatgaggaatcaggaaatcattaatcgccaccgcataaatcaaggcgccaatgataatcccgagaccatttttaaaaagtgcttttttctgcatcccactcacgtcctcgttcaaactaacataagcgtaccatatttagggtgggagattaaagaacaattgattaactattaatttacaatactctatatttttcctgtgctaagaaaccatttacttactttagaacactctgccagtcattacttgaagcccatccattgtatatacttccacaatgtccctatcaacaatcagcaatacatcatcaatatttcctgtaatttgacgcctttcaattttcgatgttgcccattgacgtctttcaaatataaccggtcctgatactttttcaagacagcattttgatagatttttattcgcgcgttttataatcaagttagccaaatacttttagctaattgataaaataaaaaacaccaagacaaatctctgttatcattgatgttcctacacaaacaatgaaagaggttattgtcttgatgcaagaacagaataccacagtcagaaaaaaaggtcagcacctaacttcgtttaaacgaggcagaattgctacgctgcacagccaaggctattccaatcgtgcaattgccagagcgcttaatgtttgtcatcaaacaatcaataatgaattgtgccgcggcgagatcgaccaagtaaaaaaagtgaatggtcaacgccaatattacgctgtatactcaccagaaacagcacaagctaagtacgaagctaatcgagcccactgtcatcgacctttgaaactcgtatatcgaacagtttgtccgtaattccatcataggagccgctcttgcaacgtctgttgagcgcaagacacgaaagtatgtcgcctataaactgagagatcatacaagtaactctatgtatttggcgtttaaacagttaatgaaggattttaagggagctgttcattctgttacatgcgatagaggtactgagtttatcaatcaacaatatgtgtcagaactagaagcatctggtttatcactatactttgcccatgcttacagtccctatgaacgtggatctaatgaaaatcataacggcttacttcgagaatattttccaaagggaacagacttcagtaaaatatctcactccgaattaaattatgccgtagagagcattaataatcgaccacgtaaagtcttaaactggcagacagctaataccacatttaaacttgtatcaaccttaaacctcgtgtaagcttaaaaaaaaaagcaaatgaactctaagcttatttaagtagcaaaaaaattggtataggtagttatttaactctattttgatcaatacaaaaaaacagatgctttcaacacttcaaaagcaacactttttagaattaaacatcagattgatttaatagaaggtaattattaaaggtataagttatgtatttttatataacttatacctttaataattgacttattttttgatataacttatactttatatataaaatacagatggaggtttcttatggcaactacattaactatcggtaattttaaaggcggtgttggaaagaccaagatggcgacaatgcttgcattcgacaatgcccttatcagaaacaaaaaaaccttagttctagatttagatcctcaaggtaacgcaacaaagatcttagctagaacaggtggtctttcaaaaattcaatatactatcacagaccaaattattgatcgccacagtaaaagatacacagaaacattaaaagcactcgcacaagagtctccagataaaggtattcaacaactagaagcagatccacgcgctattatatatactttaacaccagaggaaagagcagtctcactggaccaatgtatctataatattcgagagaatctcgacatgattggctgcgacactgcatttagaaactttcctgcatttattcgcacgtattcaaacgacgagcaagaacaagtacgttttattgcaaatctaattaatgatttaaaaaaacaatatgatactattttcattgatgttccaccgactatttcagaattttccgataacgctatggccgcatctgattacagcataattgcttttcaaacccaagatgaatcctttgatggtgtgaataaatatattggctatcaaaactttatggttgaacaatttaatattaatcttcaagttattgctattgttgcttgtatggttgaacctgatgataatcttgatcaggaaatttacaatgaggccaaagaagcgtatggagatgtcgttgctgatactatcattacgcaccaaaaacgacttaaaagatactcaagagaaggtattgatttaaaaacatataaaaatggtaactttgatcaatgggacttcaaagctcataacggattcaatgaaattcttggagagattgaaagtagagatcaatatttgaaatcattataaggagtgagctaaatggttgtaagacaatttaacactgacaatacagaagaaaaaaaattcacacgattactaaataagccacaatcaaaagttcaatcagtagaaattgccggcgaatattcatttggtaccggtacaacaatgaatagtagaaaagcaacatctaaaacaacaacaccttcttctccagcgttagaaaaaggatcaaaaaagcaaggtcgccctgttgaaataaaagatgacagataccaggtaacacgtcctaagaaaatatcaccagctttagaaagtaaattatctctattgcaagattatatgacagaatttgctactacaactaaaagaatatcatttgataaacttgttaacactttagctgattcctatatagatacgagacttggtatggctaaaagcgaacacttaaaatcagaaattgctgctgaatttgagaaaataaaaaaataaattatatttatacacaagcaaaaaaggtataagttatacacgttctaaagcagaaagggtataacttataccttttaatttgttgaatatcacttccacagcaacaaattaaccaattccaaaaacttataacttatacatttaatccatttaaagtataagttacatctagtaaaaccgagtataacttatactttaattatagttgtcccttgctatacttcgatataaatgttattttcaaatagtaaataaaaagccatcacgaacggtaattcgtgatgacccactttaagaagttatttgactgtaatttcttctaaactatgtctttgattataggctattttgttcaaaatagcaatataaaaaggcttgtttgagtatacataaaagtaggtcgtgcggcttttcaaaagagattctggtttaaccaggctcgcatttgcctactctaaaaacactagagcggactcgcaaatgcgggttcgctctttttaattgataaggagatctaacatggataatcaactgaactattacaacattaagcgggaatacgcacttaaattcttccaagttcctaaggtctttatgacaaacgacaaatataaaaaattgagtgctgaagcaaaacttgctttcgccattctttctgaccgcctccaactttcaatcaaaaaccattggttcgataaagccggcaatatttattttatttacactggcgaacaactagagcagattcttggttgcggacactcaaaaatcacttcaatcaaaaaggaattaactgaggcccaattattagttatgaaacgtatgggacaaggtaaagcaaatcgtatgtatttacttggaccggaaattactgataacgatatttatggcatcgatcaacttgaaacagctgaaaatccactcgcagaagaagttgtaaacattgatttaccaacatctatgaatgatggacagcctgaaacccttgataaatctagattgctgaaaaacagtaatctagattaccgaaaaacggtaactagtgatactgatattaataatactgaatatcttaaaaccttaaatacagatactaaaaaaacagatactctaacggacagtcctcaaaatatcaagcagctacaagacgctgcgctgtttgaagtgcaattagaaaacgacaatatcttttctaaacaacaacttttagccttaaaactcttatcaaacggagattttgaattgttttgtactgttcaaaaaacaattctacgtgccaaaaaacaagcattaaacagtcatcagatacaaagcagcttgtttgatttacaagacgaagacatcgaccaacctgtttatgatgccttaatgcgaattgtccaacaagtacggttgggtgcaatacaggatttaaatagctatgtatttagcactatgtttgatcagtttgagcaactaggcagtaaacgtgccataacagcatataaaactagtggggcaactatcacctgggagtaacttttaaggcgctatcaggctaattattagtacccagggtaatttttattaaatttcatgttgcaacttaattgtctgctatgtcatgatgtacacgaacaaagcgaacaagggttcgtcaaaaagggttaaataccgtatatacaacgtttgaaaaacataagaagctttattttcatgttaaaaatttaattaactaaattcataattgttagcggttaataaattgtatgatttgttaatttattaaaatttgtcgttaatcggcatttagtttaaatttacaaaaatattggaggtagtagcatgaatacgctatattttcacgccacatttgtcacttagttcgtgaattgcaaaataaattcttaaaatttatattgcaattaaaaaaacttaatggtaggtattaatgtatggcgagcaatacaagcatttaagcaatgacactaaattagcctatatggtactaaaagaccgattagagtattctttgcgcaataactgggttgatagtgaaggacacgtctactttatctttaccaatcaagaactaatggacttgttcaattgttcaaagggaaaagtcatcaaaataaaagcagagttggaatcaatcggattactcgttcagaaacaaatgggctttaacccgaaaactaagaaaaatgaaccgaatcgcttatatctgtccaagctcgatgtgaaagcaaccgatgtctatttacgcggcgaatttggtcaaaaaagctctcaaacccttgctacgagcggaagttcaaaaaatggacttaatctatatagagaacctaaagaaagagacaaaaacagatgcaatatagatactcaaaagttggacttttccacagccaatttctcaccagcagaaattcaaaaacaaaaccaggatctcataaatcatgctaatgacttcttaactgatgaagacagtggcttacccgttttcttagaacccgaagccgtgcaactacttagtttttggtgccgtaccccgcaacaaatgcggcgcttcattggtattatcttaaatgctaagtaccgagttgaaaaggatcatcaagatattggcgtcataatcccgctttacgacgaagaactaaaacctttgatgactaaagccttaagacgctactttaacgccctaagaagcaatgaaaagcatatcaagaacgtggaaaactacttgtacggcaccatgcaaaacctatttggcgtttggtggaataaacaagcggctagagaatatgcggccaaacaccccgaagaacagaacactgacaatgagcgttcttgaaattaaacgtcatatggactcatttaagccgttttaagtgttgcatgcataattatattaaaactgctttaaaatcgtttagaagtaaaaataggtgccttaagtggttgaacaggtgatgactgaactaagtgaaagtgaagggagctttttaaataatcaaaccaagcaaagaagtcgaaaaaatagagcaattgttggctgacccctggacagtcaatatttaaggcatttgggaacaagcggcacataatccagaccctgataagcgcaagttgtttgacgcgttacacacttacctcttagataaacggcaagaaaaaaattatcaacgaaaagcatttcgtgatttaacatggacgagtcaaagaatcagtggttggaatgaaaaggaggcacaaaatatgactaagacacaagcatatatggacaagtatcaatttacagttgcagaaaacaaacggtttgctcgaacaaattttaccaagctagtacacactagtgcccgctttgaaggcgtaaataccactttgccgcaaacacaaaccattatggacggcatgagtgtggcaggcgttcctgttgaagatattttgacaattgttaacttaaagcgtgggtggcaatatatcactgatcaaaattcctccttaacgttaaccatggaaaaacaaattaacaagattgtggccgcggaagacgccttagtaccaggagaattacgacaaggaaaaggaggagttgatttaggcagtgaagacttttttgaaccacccttaattaacgaaaaacaagaacaatcctttttacaaaaaattttggctgatccgcaaacaacgaccactgataaagcattgactgttatgtatcataatatgcgccaacaaatcttttgggacgggaacaaaaggacggcgactttaagtgctaataaaattatgattgacggtggtgcaggcttaatcaatgtgccgttagataagtgggatcaatggaacgaactaattgccaattattatcgaactaatgacatggctaaaattaaacggtggacatatgacaatggcattcaaggattacaaattagagcaaacttagagcttaaatcagttgaagacgaaattggtaaaagaatccaagaacaattaaaagattttgcggatcaaaacccagaaattaagccaaaaaatgatccagaaaataaaaacgatcggcctagttattaggttgatcgtttttgagcttattcggcttatgggcattaacgtaatcggcaaatgtttttaaaagctcttcggtttgttcaaccgaaaggttatcagcttgaaagtatttttctagcaaagctcctttttgaattaatcggcgagaacgagctttgcggtcttgccgactttcataatatttagattgccgtaatttaaaatcttcccgctcaattttttgttttaaacgcgcttgctgctcgactagtttttcatattgattagacatagaatttccccatcgcgtatggttaatgatctacggactttacctttaaaaattcagaaaattgcttagctaaaagcttaatctgatcgttagacaaattagcataatctaaattggcttgactgatgatttgtttacctagccgttgttcaatcttatttttttcgtccttaattttttgattaagggcttttaatttagcttcttgtttttctaagttactttgagacataatgatccctccaatcatatttgaaataatcaccgaaactatatcatataggaaacgttaagtcaaagtataaaagttgaaatagcgaagcggaaggcatacactaaaagtaaattcaggataatcagcagaccgagtgaaacgaggtcaatgcgcacttacacacaacaactaaagttggttgtattattgtgctaaacccttgtatcagaagtcgccgttggcgacaacaaaagcaaacccataaacctaaagaaaggtggtgaccgacatggcaatttttcacatgagttttcaaaatattagtgctggtaaaggacgtagtgccattgctggagcaagttatagaagtggtgaaaagttattcgatcaaaaagaaggtcgaagctatttttatgctcggtcagtcatgccagaaagctttattttgacaccaaagaatgcgccagaatgggcgagtgatagagagaaattatggaatgaagtcgaaagaaaagatcggcgagcaaattcacgctatgcaaaagagtttaacgtggctttaccagttgaattaagtgaagacgaacagaaagaattattgacaaaatatgtacaagaaaattttgttgatgagggtatggttgccgacgtagcaattcatagagatcacccagataatccgcacgctcatgttatgctaactaatcgtccatttaatccagacggaacatggggattgaaaagtaaaagggaaaatatattagatgaaaatgggaacaagacttatacaggaaatagtcgttttccaagatcaagaaaggtgtggctagttgattgggataaaaaagaaaaaattactgaatggcggcacaattgggcggctagtgtcaatcaagttttagagcaaaaaaatattccggatcggatcagtgaaaaatcatttatcgagcagggaatagatgatacaccaactcaacatgaggggatcaatagcaagcggcatgaaagaaaagaatttaaccaacaagttaaggactatcgtaaggccaaagccagttataaaaataaccaagaaaaagtaatcaatagaggtcatttagatagcctaagtaaacacttctcgtttaatgaaaaacgggtagttaaagagttaagccatgaactgaaaacttatatcagtttggagaacttagatgataagcggcgcatgctatttaattggaaaaatagcaccttaattaaacatgcagttggtgaagatgtgactaaacaattattgacaattaaccaacaagaaagctcattaaaaaaggcagatgaactcttaaacaaagtggtcgatcgtaccacgaaaaaactttatccagagcttaattttgaacaggccacgcaagctgaaagacgagaattaattaaggaaaccgaaagcgagcaaacagttttcaaaggcagtgaattaaacgaacgtttaatgaatattcgtgatgatttattgactcagcaattattgacctttaccaagcggccatacgttggttttaagttattaatgcaacaagaaaaagaggccaaaattgatctgaaatatacgctaatgatccactctgatagcttagaaagcctagaacacgtcgataaaggactactagaaaagtattcaccagcagaacagcaaaagattactcgcgcagtcaaagatctacgggcaatcatggccgttaagcaagtcattaaaacgcaataccatgaagtattgaaaagggcctttcccaaaggtgatttagatggattgccattgattaaacaggaacaagcctatacagccgtgatgtactatgatcctgttttaaagccatgtcaggccgaaacgattgaacagtggcaagcaaatccaccacaggtgttcagtccccaagaacatcaacaaggactagcttatttatcgggacagcttagcttagatcagttagagaatcatcacttacaacgggttttaaagcatgacggcactaaacaactctttttgggtgaatgtaaagtcgatccaacgattaaaaacagtcagatcgagaaaatccaaaaacagttaaaagggcaacaagccaaggacgaccagtacagaaaagcaaatatcggacattatcaaccactgaattacaagccagttagtccagactattacttaaagacggcctttagtaacgcaatcatgaccgccctatatgcccgtgatgaagattaccaacggcaaaaacaggcgcaaggtttaaaggagactgagtgggaaatgacgaaaaagcaacggcaacaccaaactcgaaaccggcatgaagatgggggcatgcacttgtaatgtaaatgtaaaagcaaatgtacacaagtgtgttcaaatggtgctataatttagttaattatttaagaaaggagttacctgcatgtggcaagacaacacgaatggattagtttatctcaggccggtatcaagctagggcatgatcgatcatatgtaagcttatggttaagacggcacccaaatagaatgcccgaagaatacttaatggaaaccggcacagttaaattaatttcattggaaggcattgaatggataaggaaacaaacaaaaaaagagggcgtcctcgtcagcagtagagttgctaacggggatcagcacctagaattacgccttctaggtgtcaccctcctaacaatccattttaccgggtgggctaggggaaagctagttgcttaatatttctagcctagaaaagggcaatataaggaggtgatccaatgaaagtagaaagctggcaaggcattaatggcaagctagttcatgatgatcaaaaggcgattgtggttgatgacgaccacgcactaactgatccaaaacagttacaagcgatattagatcaagacggtcagccaatcgatgaagttcggcaagcaatgattaagaagaccgttaaacgccagttgaagactgagccgttaaagcttagtggttggtttaatcgccaccaagacagtcaaaatgctaaaaaggccgaaaaattggtaagtgataaaccgactcatcaatataagcagatcaaaaatgaaatgaccttttttggtgagagtttcctggaaggtttcttaggtttctatggcttagaagctgtttagtatctttgattttgacccaataatttgataaactactgtcaaaaaagttggtgatcatatgcaacattttagtcatcattaccaaagcgatatttctcggcaacaattcgatttgatccgtcaggatctggaagcttcaagaaaacgaactcacccaaaacacattgatccttatgatatcttctgtgccatgctctatgtccttaaaaatggctgtacttggcgtgatttgccggctgattatccaaagtggtccaccgtttactactattggatgagttggtcaaaagcccccacccctgataaaccagctttattaactcaggttttaaaaaaattgtcgctgatcgacgattaaggcaagggcggtcagcccgaacttcgttcgtcattttagatgcccaaagcattaagaacaccgctaccgctgaaaataagggttacgatggtggcaagaaaatttccggcattaagcgccatttagccgtcgacatcaatggattcccgcaagctatccatattacccgggctaacatcactgatcgtgacggggcgattgcactcgtcacccttaatttagagcagtttaaattggttcgaaccatgatggttgatagtggttataccggccaaaattttgccaatgagattagcagtttaacctcagccaaggtaatcgtcgttaaaagaaatgagttacaccaattttcggttatcccccaacggtggctcattgaacgttcatttagttggttgggaaattatcatcgtttatggcgtaactgtgagcgtaagctcaacactagtctcatgatggtttcgttagcttttatcaggttacttctcaaaagatactaaacagtttctaagattttttgatggtatctttagattgggtcatgaagtccgtcctaacttattggttttgtcacttataagtttaaggcttcatggcctttttggtctagttatttaggtgttgcacttacattgtaaatccggcgtcacaaaaaaattgactgacgagtaaataattcgttgactcgtcagtcaatcgcgactatactgtaggcgaaaaggttgatcagataccgacatattaaaacgtgtttcaagtttgaccttaaggaggatgacaaaaatgacaacagctattatcgaacttgaccatcttcaaaaaaactttggcaagtttgccgcattaaaagatgtcagtttcacgttggcacccggtcaggttctgggttttctaggacctaatggggccggcaaatccacgaccattcgagttattttaggcttattaaaaaagagtggcggctcagtgaccgtcttcggcaaagatgcctggcgggatgatgcggcgattcatccacgcatcgcctatattcctggggacgtttatttatggccaaatctttctggcggcgaaattatcgacctattgctacgtttaaatggccgccagcataatcaaaagaccgatgaactaatcaaggcctttgaatttgatccgaagaaaaaagctcgtacctattcaaaaggcaatcgtcaaaaagtagcgttaattgctgcgttgtcgcaagatgccgatttgtatatttttgatgaacccacttctgggcttgatccattaaatgaacagactttccagcaagaagttttaaaactgaaaagagccggtaaaagtgtgctgctatcaagccacattttgtccgaagtcgagcgaatgtgtgattcaattgttatcatccgtgatggtagtgtgattgagagcggcaatcttgatcaattacggcatctatcgcggatcaaaattgaagtcaccaccgctaccccaatgactgctttggcaaagcaagctggcgttcacgacctcacttatcgcgattccgagcacaccaaggcggttttcaccgctgatcgagacgcgcttggcaccatcatgaccacactggccgccaacaccgtggtcgacatgcaatcaacgccgccaacgctggaagatttattcctgcgttattatggaaagcaaggtgagactcatgcggcacagtaatcggaacgcaggttatctgcttcgggcaaacctcaaacaaaatctaaaattttcactcatctggcttgtcattttgatcatgatgattgccagtggtgctggcaaattggaagcagcctttgcaggcggggcctcgggctctaaagagattgtcaaaatgctgcaagcgccgggcatggcggcaatgtttggcgcgatgccaaaggtggacacgtataacacagcgattgtgtttgctggtgtgatggtcgtcttcatgattattttgcaggccttatgggttatgccgctgatgattcgcaacacccgcggtcaagaagaaagtggcttgctcgaaatggttcgcgctcgcaatgttgggcgaacggctgccatcaccgccgcttcgcttgagcttctcatcgacagtgccataatgggtatcctctattttgtctcgttggccgctgtcaacatgggtggtactgacttgtacggtgacttcctgttttcactggggatggtgatcgccaacttgctattcggagccattgcgttgctattcgcgcaactaaccaataacacacgtacagccaatatgttgagctacatggtgctgactgccgcttatttggttcggctggtcaccgatatccagcatcaaaatctgacgtggttatcaccaattggttggttcgaaaaagcaaacttctatactgataacaacgtctgggctttaggtttggccttactggtcagcattctgcttgcggccagcgccaccatgattgcccgcaaccgcgatctgggcgccgggattattgctgaacgcaccggccgagccaaagctgccggctggcttcgctcgatccctgccttactgtggcgaactgagcgcggattatttgctgggtggttaatcggcgccgtggtgtttggcggcgtcatgggtagtgtgctcggcggcgttggcgacattcttaaaacgaatccgctttatcgtaaaatactagatgttggccaaatcaacgctgccaatcagaccatggtcctgtcattcttaggcatgtatctcggcattttcgtcgcattagccgtgactgctggcgtccaagtggcattccgactcaaacgcgatgacaaccttggttacttgagcgtcattcatgccgaaaagccaacgcgaaccacgatcagtgtcagctactattgctttggtctgctggcaggcgtgttcgtcctttctgctgggctgctggccttgttcttcactgggaacactgttctcagtcacccgttgccgctcaagtacctcggtcgcctattcgtggctagcgttccggctgtgatatcgtttatcgcccttggcatcgcactagtcggtctgtggccacgcttaagcagtctattctggctgtatatgggagccggtctgatcgttcaaattttccggggattgtttgatttgccaaaacacgcaggcaacttcacaccttttggctggattgccaatgtaccggttgaaaacgttgatcaaacatggctaatcgtgatggttgttagcgctatagtattatttattcttggcattgctggttatcgccgtcaggatttgagcctatgaaaaatgttgtgacagatcctgaaaaggtcacccgaatcctcaaaacagcgacggaaattttcggccagcaaggcttcatcaagagcaaaaccgatcagattgccaaccaagcacaagtatctaagggcttgctcttccattattttggcaataaacaagcgctgtatcttgacgctttcaaatatgcctatcatcgaatttatgatcacatggaccccaaaaagtggcagaatgcccctggcttggctgccatgatgaccactgcagttaagtatgagttgaaactacaattcaaattcccagctgaataccgcttgatgatgcaagcctatgctgatttaccgcattttcccgaaccgttgcgacaacaagtgcagcaagaaacaactgccatatccgctgaaaccgatcgcatttttcgcgagaaaattgaacagctgcctcgtcgtgagggcctgtcagtcgatgacgttttcggtgtcgtttctgccttaatcgcccaacaaacggcggtcaccaccagactcattgccagtggccattatcgcaagtttgaagatctgcagtccgtggttgagacgatggcacgccagttattgattgtcgaacacggctttttaccagatgaaagttgacgtcagctgatagatcaaaaaaggtcattagggtataccctattggccgtttttatttttgtgctatactaggaaatacagatgttcattagaactgtccaaaaaggagcggcaaaatggcaactattggttatgcgcgcgttagttccaaagaacagcatttagatcgtcaattaaatgctttaaagaatgttgataagcttttcactgataaattaagtggtgcaactaccaatcgacccgagttgcaaaagatgttggcctatatccgtgaaggggatattgttttggtcactgaattagatcgattaggcagaaataatcaagacctaaccaaaatcatgaatagcattcaggataagggagctacattagatgtgttaaatttaccatcgatgaccggcatctctgatccgaacttgcgccaactgatgactaacctcattattgaattgtataagtaccaagccgaaagcgaacgtaaacgaattattgaacgtcaacaacaaggcattgccctcgctaaacagcagggcaaataccatggccgtaaagcacaatataaccaagatgatccccgcttacaacatgcctttaaactatatcaagccggtatgagtgatgtggacgtggcccgcaataccggtataaagcggacaacttttattcgttatcgaaagaaatttaagattgtgagaggtggagtacatgaagccacataaaattatcctcacttgttttgcgcttcttgttttgggagtgtgtagcctagtaataaacacctcggctaacgcagcaatctgccataacggcggccgggcggactaccgaggattgattaaatacactaaggcggccaaacgggctaagtcccacgttgagtgtgatacgattttgatagatcaagacagtgccagcgatactttcccggttaacgacatcgaaacgagcgacggtacgattgaacacgaggctcacgtttcgaaaatctctgaagcccaactgtactacttgaaaagtcggggattagacgaagcgaccgcctcccaattgattattatgggatttttggagcccttcactaagcaattgcccatggaatacgccgtggaattagaccggttgattaagtttcagatggagggcagcatcggctaaagctgtgaaatttgcgaacgttatgcaaaattttgcccaataaaaagaacggcgaattaacgccgttcttaaacgattgataataaaattaaattagaaaacatttttaaatttcgctaaagcacttgacaaattaacttggataatgtaaaaatatagttgttaaaagtataagtaaactttgataatgaagtggtgcatattgaaagaaacgaattatgtcgaaaataaagtctatgaataccgagtactccaacatctttctcaagaaaaattaggtcaagcggttggtgtttccaagcaaaccatctatgcaatggaaaaaggcaactactcacctagtttgattttagcctttaagctcgcacgattttttgatgtaccaattgacgttctattcacttatcgggaggcgtaacaatatggcccctactacactttttaaatcaaaatgcccatgtaatcgctggtgtggcaatcggattaatcatcatttcaattctgtttttctactatggtataactagaattggacgttcggatgaacgctcacagcttattatgtatcgcgtttttaaaacgatgtttgcagcgtgtttattatcgatgattttatttatgacttttgtgccagaccgcttaacagcagttcgagattggtttacaactctattcagtcttgtatttatcagtggcgcatgcgctgtttttattgaaccacggcgtaaagtttaacccttaaaaaaaaacggtttagtcaatctaatgactaaaccgtttttttaatatgttgtttttcgtccttttggaattaaataataaaagataccgattaagatgagatcaatgatcatcaatccaataaaaatcgctgttcgacccgttaggtaaaagaaccaactaccaattgagaagccaatgattgagctaacaactaggtgcagcgcaaaaatttgggtttgtgccacgcggaatttacgatataaaccagtgctgagccctttttgtgcgtgataaccattgataacttggctaaataaataagtgaaaccgaccgcgatgatcatgaggacggcaattaccgcgattacacccgcattttgacggagccagttgacgccgactaacggcgtcgtcttcggtgttaaataactgtgcttagtcgttttgaaaatcttttggtaagttttcagatgcgctcccatctgcggaccatcaaccaatacggtgactttattcagtgggcgatcatttaatacaaattctggtgacgtggatacaaaaatgtgctgatcaagcgtagttgtctgattcgtaccgacaacgccaatcacggataagtagcgaccatgatcttgataatacgcttgactagctggtttgtagagttcagcaagtcgtgattgaccagcaacgacgactggaatctgtgatttgaaatcgtaactggagaagaaccggccgtcttttaatgggacactcgataacttccctttcgcatagacatatgagaaccgggaatcaacgttgaattgaatttgaaaatggcttaatttcgcggcatcaattttttgaatggttttttgaatcgactgttgactcttagaattaaaaatcacagcattttctgataaactattgtgatttaagcgttggctatagttagtttttgcacgttggctaatcgttaacatgcctagaactgttaaaccaactagtaaacaatctaatattatttttttcaggcgcacagtgggccctcctttaaagcagactattgaatccagtaaaaccgatcacgcattaaatcgaatgggcgtaagtaacggttaatccgtgataaacgggcgtcgttgtgataatgggccgccgtccaaaaggcgtgactattcgtggcgccaaaacgttcgcctaagcacaacaaaacgggggcatttggcattgcacgaagttgttgcagcaattcataatcaactgggacgccgttgggtgaccaggacattaagactgcatcgacttgcggaccatattttgggaccgcttgtttggcgtcaagagctgccactgacgtgactaattggcgccctgtttcattctcggcagtccaggctaaactatcggtacaaatcacatcagcgcctgcctgccgtaaaccagcacttaaatagccgttaccagccatgacttctagaaaacgccaattgggaaactcgcggacaatcgccgccgtcaaatctgtagtgatataggcccacatgccaaagcgattttgcaaatattcacggtaattgcgcagtaagtggtcgattaactgtaactgacgttgaacctcagccacactagcggcgctaaaagccccctgttcagcctggagtaatatttctaaatacagagattcatcaattcccaaaacgggtaaattatgtatgggcaagccgtcctgttcaatctgcaataaactagttaaaacagcatgaatttgtacttgaatggctgggacggttgcaaaaaaacgttgactctggcgcaatttctctggataacttaactgtatcataatggattccgtttctaatataagtttctcttaaacgattagaaaaaccttcccaatcggaaggccaaatcgaacgttttaacgaatcccgagtgcaatgcgtgcataacgggacatcttgctggtatcccacgctgggtaccagacgagattgactttaacttcattgacttctggaattttgcccattgcttgatgaatcgaatccgttaaaacatcggttaagggacagcccatcgttgtaagggtcatatcaatcgtacataagccattttcatccaggtttaaaccgtaaaccaagccgagattcacaatgtcaatcccgagttctggatcaatcacggtctcgagcgcggctagaatccgttcctttaagtcttcaattgctgcatcatcttgtggttggtctgccatgtgtcctgcctcctggtcactctaatagctctattatactggttcaaccgaccagttacaactgacgatcattgacaacaatccgcataccccctagaataaaaagacatatcgtgttttaaccaaacacgtttttaaaaggaggcgccgctatgcatcaaaaattgattgcactggatttagatgggactaccctcaattcagatgcccaaattacacttaaaacgcaacaaactttaactgaattacaaaacgctggccacattgtcagtattgtcacagggcgcccaaatcgtttgagtgaacctttctaccaacaattaggtttaacgtcgccaatggttaactttaatggggctttaatgcacattccgggacaagcctgggccggtgaatatcaatatacgattaataaagacattgtctttagtctcttccaactaaaagaacgctttaagattcaaatgattgccgccgaaggtaaaacgatgtttttagctgatcaagcttatgccaacacgttttctttcttccccacaacgttgaagtccgatgaaattttaacccgcgaatcgcttcggcaagacccagcggccgtcacggtttttgtggaacgcgctgatcaagatgcgttacgtgctgaaattctgcgccaattccctgacgtttccgtcaacacttggggtggtcctgctagcgtcttagaaattgtgcatcatgggattcacaaagcaaccggcctcgcaaaactagcggcacactacgacattgatcaatcagatatcattgcctttggtgatgaaagtaatgatttggatatgttagcctatgccggtaccggggttgcgatgcaaaacgcaattgcaccgatcaaggcgattgcagacgacatcacaccactgacgaatgcgcaagatggtgtggtcaattatttacggcaatattttaagatggattaatgaaaaagcgattcgacaatttctggtcgaatcgctttttttgatggatgaaacgtgcttttcaagctaactttctgtgcttagctacatccgtcaaatcaccgattttgtcggtaatctgcctgattaggctaatcctcagaagatacccggcttattgcacactctattctgaaacgtgctccgtcagatatacacttccggttagttacataccgcaaacgatcggctacgccgctcattcacggtattagactaatcctcagcgtatgaccatctgacgtcgcactctatttttcgtcgctctttagcacgccgcctactgagtagcggtctggttgcatttcgtttaggacaacgtgcacgtgttctgcaggtgcgcctgtgtttttagtgattgcttctgtgacgtctgcacagagttgttttaattgtgcttggctccggccagcgattaaatcgatgtgtactaatggcatgtgtggtgcctcctttaattgaatacttatattatgcctgttttaacgcaattgagcaacggtaattactgtgtttttaagcaaaagaatgtataataatagctaatattgatttatctatggaggcattacaatgagtgaacccctttaccgtcaattgacggcctgtaccagtgttttagttggtaagaaagccactgcagacggctcaactttaatcgcacgtaacgaagatagccaggcagcttggcctaaacatttaaccatccatccccatcaaaagttaacgactgccccgcactttgtctcaaaagacacgggtttttcaatcgatttaccacttgaagccgcaaaatacacggcgacacccgaatggaccgatgaatatggactattcgaagaagacggcattaacgaatacggcgttgcgatgagcggcaccgaaagtgcttatagcaacagtcgcgctctcggctttgacccctacatcgacaacgggattgctgaagaagccatgattacagtcgtcttaccttacgtgaaaacggcccgtgaaggtgttgcgcggctaggcgccatcgttagtgaatacggcaccactgaaagtaacgggattctcttttccgatgtcgatgaggtctggtatcttgaaatcggcagtggacatcactgggttgcccaacggattccggatgatagctatgccgtggttgccaatcaacttgcgattcaagaagtgcaattcgatcaaccggattggttcatgacttcagaggggattcaagattttgcgcgtgataatcacctatggcaagctgatacgccatttaacttccgcgatatctttgggaccaaagaccaaagtgaccttgtttacaacacaccgcgcgtttggtacggtcaaaaattgttaacgccatctgtcacccaacaacctcaagactttaacctccccttcttacgacaagccgatgcgcccattcaagtcgaagatgtcgcgcgaattctaggctcgcattatgaaggcacggtctacgatccaatcggtcacggcacaccacaagaaaaacatgctttccgcccaattagtttagcaaagacgcaagaatcacacattctccaaatgcgccctaacttaccggttgatgttagcggtattcattggttatcaatgggtgtcacggcgcaaagtgtttacgtcccattctatgccggtgccgatgacgtcccagtcaattaccaaaaagggacaaaggattacagtcaagattcgatctactggacctataaattagctggtattttggtggatgcacactacgccaagttcgccaaggacttggaacaaacgcaaaaacacatcaatagtttgatggttcaaaacatcgtggcaactgatcaagcggttgctgctgaaactgatgcacaccaacgaaccctgttgatgaccaaaggttctgctaaggctgcacaactcgcacaacacgaaatggaacgcctcaccgcaaaactgattacggatagcgcgaacctatcaccactcaactttacaacggatagtaatttatagataaaaatggtcccacatcgtattttgatgtgggaccattttatttactcagcaatcatctctctaatcttgtaagttccacttgcgtatctaacttctacccgataaggatgtccatggacaactgatttagaaggagtaaatacatttccatttagggaaccatagtagttttggccattggtgacttctgccagatagctgttgtttcctaatacgactatcttataatgcttaaataattcgttagcaaaggtaacgacgattttattatttttaacactcatgtcagcaactaaagtgttcaagaacagttgctgtgcatggttaattctttgagtcaatatcgtcttttccgagcccttaactgcgttaatttgtgttcgtaattgatctaataggtcttgtgtgacctcagatttcaactgatcgtttgtttcaaataacgcttcaacttgacgtttcagaagaagaatatcctgactaatcattttgagaatgtaagacttgtgcggtaattcagccactacggtaacaacatgtgcatccgcttggttaggaattgttaagacattatcgtcgagctgaccaccactactgataccatttttgacctctgcaactggttggtcgtcaacaagtaccttaattttcgcatagtctttaaacttctcatcagtaaacgataccactaatgctgattgtgaatccagttgaatatctttgactaatgtagctaggtatttgtcttctaattttgtaaatagttctaagagtttttctttatagtcaaaagtagaaggaagagcatcaattcgatttcggagagcatctagtttagcttgggttagaattgtaccaatcggttctgatgcattcaaatagtttaataactcttcttcaagtgcaatactatcaattgagtgttcatatcgtttaaaagtaccatttttattttgctgttcaattgtaatcacatcagtcggtttaagcatctcgattgtttcccaaacattatttgttaacatactttcaattggctctttattgacgagtttggaaatcacttgtccattctttttaaggattaattgctcatccttaaatacatcggtttggtagtcagtcaggttaacttgaataccgtggtcattcagcgatacggtgtcgattaagcgcatgggtaactgtttattagtttctttatcatttaaccaaatagcttctggtaaaggtgctaattgactaatttcagctttaactgctgcggaaatatcaaatccccattgttcgaaataaggctgcatattataacccgtaattctagaaacatttagaacaaagttttgcatccgttcattgtctggtccaaatgcaagcttgttttcacgatagtactgatgtaaaacggggtaaaagttatcaccaaatgtatttcctaattgaccaaacataaccatctttaaattattattttgtgcgttgaattgcttattatcagattttagataagtatgcatttctgggtagtattgatctaacgatgtcattttaccagtcaattctttttgagccgctaatgcataaatgttaacacttgattctacaacagcaccccatttccaaggtgtttgttgtctctgatgaccactttcatgccagatgctccaaccttcatttgtcttcagtagtcgttgcaaagcgcgatcattatggaagcccataaattcattttctgtatacatatacaacttaggtgactctaagaaatgttggagatggcgatcaacaaagtttactggatttccttcagtagtaatgcctgaaacccgatcttgtgccgttaaaaaccgatcataataggtcatcagttctttagggtcaccgagatattttttagccattgcgtaactaactgtaattaatgctttgttactgaccaactgcacatctttagcattcgtcatttccgccatttgtttctcaaagtctgcgacgctagtttgatttaaatcgaaatatggcattgatcctgttgcccctgatattgtgattgttgcttcaccagaatcattaggattagtcacataaatcgggccctcgttttcaacggtaatcgttgtaatgccctttgttaatggatattgtttttgattttctcgttcgggcgaaccaattgtgatagataatgaatcttgcatcccctgagcaactgtcaaaacatcccctttttgggcgtataaaccgctaggctctaaacttgagtagcgtaatgttctgcgttgccggtctttttctttaaaaacatcaccacgaccaatataggttttcatttcttgtggtgcttttagattttgctggtgcctcaccttggatttgaggctatctgctagcacgctactcgctaaattttggtgattgtcacttggttcagccttaactgtttgtatagaactgatggtgctagttgttaggattcctaacgctaaaattccgattacattcttgatagtctcatcccctaaaagtattattatttttataacatattcagattagcatggactgctgaaaattgtctattaaaaaaccctaatgatttctataattattctattaatattaaaaatgtcaataatgataactacaactattacatttaagaataaatcgctctataattgtgatgacagtgtttacaattgtgtaaaataaaataagacccaccacttattaagtgatgggtcttattttattcagttataaatgtattataatgaacacccttattaaagtaattccgctaccaatggccaattgatcatcttccaaaagttttcgatgtaatcaatccggttattctggtatttcaggtagtacgcatgttcccaaacgtcaagtccaagtagtggtcgattacgactcataagtggtgaatcttgattaggcgttgtcatgatttgtagttcaccattttgatcgataacaagccatgcccagccagagccaaatacaccaagggcagcttcggtgaatgcttcttggaacgtcttaaacttcccaaagcgggcttcaatccgttcgagtaattcccccgttggtgcttctggcgcattcggtgttagaattcgccagaagaaactatgattggcatggcccccagcattattgcggacaggtgcttgaagattctcaggtaaatcatcgatgtgtgttaacaaatcatgtaatgatttacctgctaaatcggggtgcttggctagcgccgcgttgagttttgttacataagtcttatgatgtttgtcatgatgcagatgcattgtttcagaatcgatatacggctctaaggccacatattcataaggtagtgctggtaatttaaatgtcattgttcaccctccttgttataacctcatcatacaagtctatggcgttaaaaagcgaataatatgattctacgaccattgaaaaaagctgactaatgtttattagccaactttttttgaatcctgggtagctgcgtatcgatttctgccaacatcatgttcggtgtcttatgttggaaaaaaatggtgtagtccgcaagccgataatactttggtcgtcgtttgtgatacagttcgcgtaaaccatcgtggcccaattgattcacaagtggccgccgatcattgcgcgaaacgcggcgccaatgtgcttcataactcccatttaggaaaaaaatggggatatgactctgttcaagtaaatggcgcgtctgagcatcatccacgaccccgccgccggttgcgataatcccatcgtgttggatcaatgtctgtaaggcctcaaattccatttgtcgaaatgcagcctgccctttttcggcaaagatttcgttaatcgtcatttgctgttcttgcatgatgtagcgatccaaatcaatccagtcacaatggtaatgatgtgcaactttgcgtgcaatggtcgttttaccagaccccataaaaccgattaaaatcagttgcatctagtcaatcaacccctatggttctatttcaaatatattgttggttccaagactgctccgcacatacggtcagttaaacactctttacaagttagtttcattgtaaggtatctgtgggttggttaccagtttttttttgaaaatagattagccgctaaagtcgttagtggtatggattgaatttttggaacaccaattgcatcgaggtaaacaagattaatggcatctccttgattcttcttatcatgtaaaagttgcgtgaagagtcgatcactcataagtaacgggctatctgtcggcaagccgaccgcatttaaaacagttgtaatcactggtgttaaatgcgcttcagtcagtccactttgttcgactaagtgctgcatggcaactaacccgatgctgaccgcttcaccgtgcatcaggctgccattggccagggtttcaaccgcgtggccaatcgtatgaccgtaatttaataattggcgttgattactttctttttcatcggccatgacaatctgtgccttgtagtgcacactttgctgaattagtgtttcagcctgcgctagaatcatatgcgcactttgaatccctgttacctgttgccaaaatgtcccaccgttgagtgcagccactttaacgatttccgcataaccggccagtaattggcgttgatccagcgacgttaaaaagtcgggatcaatcaatactaaatccggctggtaaaaagaaccaactaagttcttgccagctggtaaatcaagtgcagtctttccaccgacactactgtcaacttgtgccaaaagcgaggttggcatctgaataaatgcaatcccccgcatataggtggacgcgataaaccccgccaaatcaccgacaaccccaccacctaaagcaatcaccccgtcatgacgggtaaaattcgccgctgccagttgggaataaagtgccattgcttggtcaagtgatttcgacgtttcaccagccggaataataatcggtgtgacttgatagccaacttggattaattgagattcgaccgtttctaaatacaacggggcaacattcgtgtctgtgattaatgcgatttgacgaggtgtccaaacttgcgcgatttgttcagcacagatgtgatacaaaccagattggatccgaatctgataatttttttgtgtgaggtggacatcaattatcaccattagtgccgccactgtttgacgactgcatcaacggcccacacttgatgacacatttcaagataagtagctggctttaaggcttgtgcgccatcagaaaaggctttttctggatgatcatgaatctcaacttgtaacccacttgccccagttgcgactccagcccgagccattggcgtcacaagatcccattcaccagtcgcatgactcggatcaattaagactggatagtgcgttaatttttgtaaaactgggacagcatttaaatcaaatgtgttgcgcgtatagtgattgtcaaacgtccgaatcccgcgctctaacagcataatttgttgattaccgttggcagcaatgtactcggcagcatttaataaatcatcaacagttgctgctaagccacgttttaaagcaacgggaacgttggtttttccaacagctttcaataatgaaaagttttgcatattgcgcgccccgatttgaaaaatatcggtatattgcgccactaaatcaacatgcgtttcatccatcacttcggtcacaacgtccatttgataagcatcagcagccttgcgcaatgctttcaaaccagcttcgcccatcccttgaaaggaatacggtgatgtccgcggtttatacgcgccaccccgcaaaatagtcgcaccgccttctttagcaactttggccatcgccataatgtggtcagcagattcgaccgaacaaggacccgccatcaccgtgaagtctgcaccgccaatcgtactgtgtgctaattcgatgaccgtgttttcgggttggaatagccgactgccaagcacgtaactcggttcatccgtggtggttgccgcaatgacttcttcctctgcttgggtaaaatcaattgcttttgcaccgatcaccgctacatggtgcttaatctgatagacattcggatttgtcgtgcgttgtcgtgcgcaaaaatcatcaatcagcgctgaatcagtatttggtttaaattgaataatcataaattattaaaactccttcgttaaagcatgatagatgggatcggtttgtaggacctggcccgtccagaattgaaaactcaacgcggcctgttcaactaacatgccaagcccgttttgggttggatgaccacttcgagccgctaactgtaaaaaagcagtctgacgtggcgcatatattaagtcggcaactaaacaagtcatcggtatttgaccaattaaaggtgctgccagcggtaatccaggggtattgaccatgccaagattcgtggcgttaatcacgcaatcagcattactgagtgcttgttggagtgcctgttcatcggcataattatgtagcacgatggacatcgaatggtgattagcaatttttgccagtcgttgttcaaccaccgcataagtcgtattttgacgtttgaagacctgaatcgtcgccacaccatagcgagcggcggcttcgataaccgcgagagcagcgcccccaccacccagaataacaatctgctgactagctagattgggatatcttttctgcaaagcgcgccaaaaaccatcgccatcagtattcgtgcctaccaatttacccgatcgtaaagcaaccgtattgatggcgccaacgagttgcgcagttggcattaactcgtccattaatggcacaagcgactgtttatagggcattgaaagattaacgcctgccacaccaagcgtccgaatcgcttttgcgacatcttgcggccgtgcttggctatcgaaaaccagataccgcgcgtcgatttgatgttgtttaaaacccagattatgaatcatgggtgacaagctatggtgcgctggatgcgcaaccaagccgtaaagagctgtataacctgatatcattacattttcctctaaaactatcatactttacttaatgagatttttaaatggttagtatcaaaaagtcatgcttaatactgttattttttgtcattatccggtaagattaacatagattgaaaacggttaatataatagaaagaggtccttaataatgtcgatcgaacgtcaaacgttatccgttaaagaacaagcatttatagttgatgcatattggttaacacccattccagatttcgagcatccagttaaacatcccgtcatgattatttgtccaggcggtggttttacgtatcattcaggtcgtgaaacaacaccggtcgcgttgcgatttttagcagaagggtttcacgtgattgttctcccctaccaattaataagttcgactgaaaccgtttatccgctcgctttacatcagcttgctaagacaattgagtgggtgactgatcaagctggagaatatgatattgatttggatcgaattgttttgactggtttttcagctggtggacatgtggtcgctacctataatggcattgcgaccgatccaatccaccgagctgattacgggttagacgattaccgtggtcatcatgcagcgattgtcttaaattatcctgtgattgattttgacgctggttttccaattgatgatgcaactaagcaacagattacagtggaccaaactttatggcacgcacaaaaaaatatcacagcagcagctaaaccagcttttatttggcaaacagccacagacgcccttgttccagcaacgaattcacttctatatacacttgcattacagcaacataaaatccctgttgaataccatctctttggagctggtgttcatggcctttcgcttgctaatcatgtgactcaaacaccaggcaaaccagaatatgctaatactgtagcagctcagtgggtcccacttgtattggactggtttaaactgatggcaattttataagaacctaaaaagcaatggatacagtaatattaactgcatccattgcttttttgcttatttacggtctgccttattagcaatacctaattcttgacgatatttagcgacggttcttctagcaactttaatgtcatacttaacttttaactggtccgcgattttttgatcagacaatggatgatgggcttcttcttccttaacaactgtttgaattgcaatgtgcgtctgtgtcaaggtgggaccttcctctaaagttgtactccgtttggtcaacaaattccgcagaagatagataccattaggcgtccgaattgatttttctttaatcgttcggctaattgttgattcactgagctgcaattgatttgcgatatcccgtagaatcaattgattaggatatgcttgttttccagtaatataatcccactgtgccttgattaggacttcagcaaccattaataatgtttgcccgcgcttatgcaaactcgtgtttaacatctgatacttggcatatttttgctgaatgtattgtttggtagcgacatcgacttctttttggaactgcgcgtaacttgcatgttcaaaaatcagcgttggtcgcccaaattcagtcaatagtagctgatatcgtgagccattcatcttaataatgacatctggcacttgaaaattagttggtgagtcatcaaacatatttcctggttcaagactcagtgcacctattttgtgtaaaatcgattgcatgtcatcttgactaatggctaactgagtttgaatttgtttaatatcaccagctaataattgttcaaaataatcagttatcaccaaaatactaagatcatcagccggataaatagcagaggcctgtagtaataacacttcttgtgcatcacgaccaccaaccccgattggatcaagttgttgtagtaacgtcacaacgtcttgataagtggtctgatcaatttgattttcttggataaaacgggcttcatccacctttaaatagccatttggttcaacctccaaaatcagccgttgcaaaagttgctgtaatttacctgctttaaaccgataaccgacttgttccaacaaataatcgtataaattacctgttccgtgagccgctagctgatcaaaattgaattcttttgtacaggcttcgacggacccgacctcaaacaaggggttctctaaactacgagcttttaaataatccagtaggtcgagactattagattgcaaaatttttaaggattgttgcaatgattccaatgaatattttaatagacggttacgctggttcttcccgaaaaagaccaattttagccaagtaacgactgatgagatcctagcagcacttgaactaattaatcaacgaccattaaaaatacatcatcaacagactgccattgaaagattccgggcttgttcggattaaacttgtaatttgccggatcaaacaaatattttttatcgacgagatattggtaagaactccatttagttcaaaaaggtagaagtaagacttcgtttgaaatattacttctacctttttatttggatcgacatcttagaactttgagtttttgaaaaatttatagacatagatatttagagtattttttattagtcattgaaactattgaaaatagcgttgcatagaacaggaaagaaaggtatgatttaagaaattggtaatcttattggaccagttaataaaaataagtggttttctaattttaaaatgttgatctaacagtcttttcttagtgtactccccatgtatatggggatgattcctgctgtccctgaaacttttgccaatttagatggtactccccatgtatatggggatgattccctaactgtccatcggaaattacttgattcatagtactccccatgtatatggggatgattctattcaaaaacgtaccattgatttagtagatcggtactccccatgtatatggggatgattccaatatttgtgtctgggatttcgttgccgttcagtactccccatgtatatggggatgattccgttgcaatgcttaaaacatcgtaagtgtgtcagtactccccatgtatatggggatgattcttaactgatacaatcgcagatatcaactatgttgtactccccatgtatatggggatgattcctgtaaacaagcgcggttcttataaaactgatagtactccccatgtatatggggatgattccacgttttatggttatcgggtgtaataacccacgtactccccatgtatatggggatgattcctgacgagaacattgctaatggattgtaacctggtactccccatgtatatggggatgattctaataaagccgactaccatatcaatcagtggcagtactccccatgtatatggggatgattctcaaattagggttcttaaccaagattttagacagtactccccatgtatatggggatgattcttaaacagcaagtttgaagtgataattaacactgtactccccatgtatatggggatgattctggcgagtccatcgaatttgaaagcgcgaagaagtactccccatgtatatggggatgattctgtcatgcttaattcctccaatttaattaattcgtactccccatgtatatggggatgattcttgttcatacttcatttctgatttaactaagcggtactccccatgtatatggggatgattcttgatattataactacaatctaataataagatagtactccccatgtatatggggatgattccgttagttatcatggtgggtggtacattataatgtactccccatgtatatggggatgattccggcaaggaattcgcaacagcaatcaaaacaaggtactccccatgtatatggggatgattctcgtaaaaacgttcccgtctattgctgaaatgagtactccccatgtatatggggatgattctatcgaacaaccttcgtcaaggttaccaacacagtactccccatgtatatggggatgattctatttttaccgtcctttttagttataattttgggtactccccatgtatatggggatgattccagcgttacattgtatgtaccaaaagagaataagtactccccatgtatatggggatgattccaaatataaagcgttataagggattgtgagttggtactccccatgtatatggggatgattctagtctaatgataatatatatctaatcaataaggtactccccatgtatatggggatgattccaaaacggcaacaacggctcagaccctagcgcagtactccccatgtatatggggatgattccaatattacaattcgataatattcatttatatagtactccccatgtatatggggatgattctgccattccagacgcttgatgtggcagacttaagtactccccatgtatatggggatgattctgggctcgtgtggctcgatgataaccagataacgtactccccatgtatatggggatgattctaaaaggtgatccagttccagcagaacggccgagtactccccatgtatatggggatgattctcagaccagcagactccatcagtcaatcagaccgtactccccatgtatatggggatgattctggtactttgacacgtattacaaaactgacaatgtactccccatgtatatggggatgattccttaattagtttagtgcgaccgcgactagccttgtactccccatgtatatggggatgattccttatcagacacattaatgccaatacctaactggtactccccatgtatatggggatgattctaagcgtggcgcaattccacgcccaccatttcagtactccccatgtatatggggatgattcttgtccactagtgataacagcatggttgtccgtgtactccccatgtatatggggatgattctattcatcgcaaaaattcaataatgcttttaaggtgttccccatatacatgggatggttttaattagggccaagtgctcttttttatcataattttttcagaagtgaaattgtaccgtaaatagatttagtcatgagctaatttgtaatgaggttagatattagaaagtaaattttcatttcttacaagtctaactatattaatagtggcataataaagataacgattacattgccgtttgcgtagatacatttgaaagataatctctctaaaaaggggaaatattaaatgtcagtaaaattaacgagtagagaaactagtttatgggcaaaaaaacatgtagatgatggggaaatgttgtggcttccattagttgcccacttagtagattgcagtcatgtgatgaattggcttttttatcattggttaaatgccggtcaaagagaattgttaactcagtcggtttctgaagaagacatgcaaaagctaattaaatttttgggattctttcatgatattgggaaagccacaccagcttttcaaacaaaaaaatcttacgataataatgcctcgcttgatgaagagttgattgaacgcttgaatcgaaatggtttttctgaattacgagtatctggattatcatctccacaaaaatcacctcatgcattagctggagaagcaatcttagaaagtgatgcatttaatattcctgcttccgtaggggctatcattggaggtcatcatggtaaaccggctgaaaaacataatctcagaattcaattggaaaattatactgccaactacgatcaagttgatgggcatgttaaagatcctattgaggaagaacgtcgacaggaagaaaaacaagcttggcaagatactcgacaacggttatttgattatggaatgaatttagctggatatactgaggctggtgaaattccagaggttggacaaccacaggcagttatcttagaaggacttctgattatggcagattggctatcttcaagtgagtggttgaatgaagatcgatctaaacctctgtttccactaattgggcttgatcaaggttatcaagacatagatatgacaagtcgatttgagaatgccattttaacgtggaagcaatcagacaaatgggttccacaaagggtgatactgaatgataatactaatccatattttaatcattggggatatactccacgcccggttcaattagctatgactcaagcaattcaggctacaactgatcccggacttgtaattgttgaagcgggtatgggccttggaaaaacagaaatatctttaattgcagcggaacaacttgcgtataaaactggcagaaatggattttttatggggttgccaacgcaagcaacaaccaatgctatgtttacgcgagtgcttgagtggacaaaatttttggctgatgatgaaggaaaaaaattacaaattgatttgatgcagagtaaacgacaatataattcagaattcactaatttgccagaggctagcaatatttatgagcagagtgaaaatggcaagcaacatcaaactggatcagtggttgttaacagttggtttacaggtaaaaaatcaattctgacagattttacagtaggaactattgataatctattacgtatgggactaaaaaagaagcatctttttttacgtcatcttggattcagtggaaaagttgtcgttattgatgaggtacatgcgtatgatacatatatgtctagttatctctttaaagctatgaactggttaggagcttatcatgtgccggtaattattctctctgcaactttgccagttgaaaaacgaaatcagctggttaaagcgtacttaaaaggaaaatatggtttaaactatcagaatcgattaattgttaaagatggatggaagacaacgcaagcttatccgttactgacaattttggacggacctgaattaaaacaactaactaaatttgatcagaagaatcaaaaatctactcatttgcatgtacaacgtttaaacgtgaatgatgaagaattggttcaagcagttacagataaaataaaacagggcggagtagctggtattattgtcaatactgttaaaagagcacaagttcttgccaaagcatttcagcagaatcaaactatgggcgatactcccttgatggtattgcactccgcattcttagcacctgaaaggtctaagcaagaggaaaaattgcaaagacttattggtaaagacggtcatcgcccacacaaaatgattgtgattggaactcaagtattggaacagtcgcttgatattgattttgatgttttatatacggatattgctcccattgatttgattttacaacgtgctggtcgtttacatcggcatgatattcaaagacctgaaactttgaatattccagaattatttgttatgggaattcaagccccatatgaatatggcgatgctaatgaagctatttatgaaaagtatcttttgatgaagactgactattttttgcaagatacggtaactctaccgaacgatatttccaagttagtacaggaagtatacgatccaaaaacggatgatttaattccagaaatcggagaatcgagaattaagttagataaagatcaagcacaagaaaaacagcgttcaaatgttttccaaattgcggcaccaaaatttagacttaaatcgactattcatggttggttagattatgatttccgtaatttaaataaagatgaacaaagtgctaatgcggcggtaagagatattcaagaaacggttgaggttatcttgatacaatgtacagcaaaaggacaatatttagtggatggacggtcattaagagacgtttcagatcgtgaaatatctgaacaagtaattcgtctaccaatggccattacgcctaatgctaccgtgattactaaagttataaatgatctagaagataaaactgcagaatactttgataaatggcaagagagcccatggttaagtggggccttggcattgccgttggatgataatttatcagcaactcttggcaactggcgattaatgtattcagaagatttaggattaaattatacaaaggaggatgagtaaatatgatgagtcagagctttaatttgacaacagatccttggattaaagtgatacagactgatacaggacgggagaagtctgtatcactgattgaattttttagtcatgcacaagactatcgtcaattggccggagaaatgcgctcacaggatttagcaattatgcgttttttgttagcaattttgactacagtatattcgcgttataatgctggcaatatgccatattcttggattaccgtggattctgacacaatgcaagcaacagatgttgatgatgatacagatgctgaggatattaatgaagatttactcgatacgtggaacaaactctatcgagcaggaaaattttctaaaattgtgacagattatttgaagtgttacgataatcgctttgatatgtttggtgatcatcccttttatcaagtgacgaccgctgactatgacgctctagttcctagtaataaacgagtcgaaaaaggaaaaggtcaggtactagttaaacaacttaatcgacgtatttcggaaagtgggaatacgccatcaatttttgctccaaaaacgggcgaacggaagaattcaattgatattgatgaacttgtgcgttggttgattacttatcaaaactttacaggtgtaactgacaaaaccaaaattgagacgaaagaaaagttttccaattctgcgggttggttgtatcggatcaatccagtttatgcccaaggacagactgtatttgaaactctaatgttgaatctgaaattaggtggtgaacaagtagacccgttagccttacaaaagccagtttgggagtatgagattcaagattacattgctgttcgtaaacaacaggtggtaccggataatctagcagagctttatacaacttggtcacgaattcttcatattgaatggcaagataataagcatccattaatttttagtgcagggattccaatttttgaagctacgggtgcttttattgagccaatgacaacgtggagagtagacaaaaaaacaggggaatatcgtcctgctgttaagagtcttcgctcgttgagtatttctatgtggagaaactttggtaattacgttgatgttcacagcaattcaggacaattggaacctggaattgttagttggttgcatgatataaaagatcaagatacatcagtcattgcagatgatcaattgttaacattagcttcaacaactctgatcagcgatggtaatgcgacctcacaggctccagcggttgaagtagccgatgatatacgattacaatcagacgtgttgtttgatcctgaaattgcggaatattggcctgtacgaattgaagatgctatagatacaactcaaatgattggaacagatttttaccattttgcttcaacaattggtcaaatacgtaatgtggatgcgcgttcatttgccagcaatttaagtgccagtttttatcagaaattgaatgctccatttaaagaatggctatcccaattgactggtgatgatgacagagaacaaaaaattgaacaatggaaagagcaattagaagatattttaaatgacacagttcgtgatgtcatgaagtctagttctcctagggacgtcagtggtattgaggatgataaaggccgtttgttgaatatttttaccgctcgaagaagactaaattataatgttcgcatacatttagggcctcaggataaggagtgatatatcgttatgggaaaaatagaaaaggttaccgatagaataattcggagtctttggagagatggaaaaccagacaaagctgttttatcaaatgttcgaggtgctgctacgctgttaagtcggcaagcacagtctgtttggccagtgatgatggctaatctggatgaaaagatgttaagtcgcgatggtcgtcccacttatgcggaaacggcagtatatgcagccattcgtttttatgcgattcatcaacaaggacaaacacaatttgtttacagttcagttcacggggatgatgagaataaaggagtgagtttatttaaagcgcttgctcagttaagaaatcaaccagatcgtcaagaagctctggatcgtcgagtgaaagcactcttggcaacaagtaatgtggctagtatgattcagtctttatctcatttggttagtattttaaaagccactaatccaacaattagaattgattatgccttattagcacaagatttatatgatgcacaatttggtgttgatgttgcgaaccaagttcatttgcgctgggggcagcagtactattggagcacgaaaaatcagaaaacaactgaaggggagaaaaactaatgaccaataatttatatttagacataaatatcattcaaactgttccatcatctaatttaaatcgagatgatacaggagcacctaagaccgctttgtatggtggtgttacgagagctcgagtttcttcacaaagttggaaacacgtcgtacgccatgcatttaaggaagatcatgtgacatttagttcacgaacaaaagagtctgttcaattattggctaatgagttacgtaagcaagatggttctcttgatgaagaagctgctttaaccaaagctaatgaagcttttaaatcagctggcatcaaggttgacaaaaataatgagacgggtgctttacttttaattagtaatggtcaaattaaaaaattggctcagtatatactcaataatgatgaactcgataaaaaagaaattaaaaaagttcttaagggagaccaatccctcgatttagctttatttggtcgaatggtagctgataatcctgaattaaatgttgatgccgcctcacaagttgctcatgcaatttcaactcatgaagtgattcctgaatatgattactttactgccttagatgatgaacaaggtgaagatactagtggagccgctatgttaggaactattgagtttaattcggccacactatatcggtatgctaacgtgaatgtcaatgaattagtacataatctgaataaagaagatgccatcgctggtatatctgcttttatcaaagattttgccctatcaatgccaactggaaaacagaatacttttgcaaacaaaacgcttccaaactatgtcatggttacgattcgacaagatacacctgtcaatttagtttcggcattcgaaaaaccagttgtatctaacgatggttatgttgaaaaatctgttgaacgaatagagaacgagtataagcagacactggattttgtagatcaaccgttattgacggtagctttgagtaaatacagtacagaagctagcaagacagcaacaaacttgtctgatctcttggaacaggttacgacggagttgacgaaggtggttgaggatgaaaatactaacgattagattgacgtcgcctttacaatcctatggtgatgaggctacgtttgaacggcggacaaccggagattatccttcaaaaagttcaattattggaatgattgcagcggctttgggttattcaagagaggatccacgaatctcgcaattgaatgatttgaattttgctgtacgaattgaccaagctggacaaatgttaactgattttcatactgttgaatggaaaaagaatgttcgcaaaattacttatcgcgattacatacaagatgcagtatttgtagttgccgtgggaagtaatgatgatcaacaaattacaaaaattcacaatgcactgcgtcatccgcattatcagttattcttggggcgtcgagctaatgttccagcaggagttcttctaatggaagaacttgacgataaaaaccctgtaacagttctggaaaatttaggttggcaagtttcaccttggtctcaaaaagtttatcgaaaacaaaatcctggtaaaatgtttcccaaagttgatatatatgcagatgcaaatttacttaacgatcatcatagtgtaatggttaaagatcgagtgggttcatttgatcaaagaaatcgatactttggttatcgagcaatgtcaacagaacgagttcaactgacatattcttgtatagcagttgatgaatcaacagaacatgatgcattaagtgcactttagaaaggggggtagtctatgtattatttatcaagagttgaagttgatgttcaaaatcgtgcaaaaatcaaagatcttactcatttaggtgcatatcataactgggttgagcagagctttccaaaggaaatagcgaccggagaacgtcatagacatttgtggcgtttggatacattagcggggaaaaagtatttattgatcatgagtgaatccatacctgattctgagtttttattgaaatatggtgttacaggaactattgtgactaaatcatacgatggattcttagacaaaattcatgatggtcagattatgcgtttccgattgacggctaatcccacacatacgattacacgtcctggaaaaaaacgtgggaaagttttccctcatgttacagttactcaacaggaaaaatggttggtagatcgatcagataagtctggatttgaattggtcaaacaagttggtgttaatgacttaaatgaaacgcagacgctcgcttttaaaattgtcgaacgtgattggccaatgttacaccgtaatccaggacgagccgttcgtctcagtcgagtaacgtttgaaggtctgttacgcgttgaaaatgcagagacttttaaacagactttagtaaagggaattggacgtgagaaagcttttggtatgggaatgatgactgttattccggaggcttaatatgtcagaaagaaaaatgggtgctaataagccagaaatttctgaacttggtcgtgtacaagatcgtatgacctttttatatttagaacatgctgatgttaataggcaggatagtgctattcaagtgacggatcaacgtggaattgtatgtattccagctgctatggtgagtgtcttattgttgggccctggggttaatgtaactcatagagctatggaattaattggagattcagctatggctgtagtctgggttggtgagcaaggagtacgtgcatatgctcatggtcgcgctttgaaccactcatcacgtttattacaagcacaagcaaaattagtttcgaatcaacgtactagagttgctgttgcgcgtaagatgtatcagatgcgctttcctgatcaagatgtttcggggttgtctatgcaagaacttcgtggcaaagaaggtgctagagttcgaagtgtttatcacaaagaatcaagaaaaacaaatgtaccctggaatcgtcgtgagtataatccagataattttgagtcgggtacaccaattaatcaagctttgactgcagcacatcaagcactttacggattgagttatagtgtaattgtggcgttaggggcatcaccaggcttgggatttgtacatacaggtcacgatttatcttttgtttacgattttgcagatttgtataaagcaaaaatctctattcctgttgcattcgaaatgactgcaaaatatagtcaagacgaagatctagcagctagaacacgattagctatgcgagatgcctttcgagacggtaaactattgtctcagatggtgactgatttgaaaaatctattaaacatagatgattgtcaagatggcgcagatttatttcaactttgggatgataaacttggtatgcagaaaatgggagttcagtatcatgatgtaacggcaggtgatgacgaatgattgttgttactttatctaaagttccgccttcacttcgtggtgacttgactaaatggtatcaggagattcaaacaggtgtgtatgtaggtaatgtcagtgcacgagtccgtgacctactctgggaacgtattttgaaaaatattgggactggtgaagcaacaatggcgtataatactgccactgaattaggctatcagtttcggacaacacgtaaggatcgacaagtggtcgattatgatggtatacccttaatgatgcatttaaagcaacaagaggtgccagttaaacatggattcagtagtgcggccaaattccataaagggatgacaatgtcacatcgacgtatgactaaatatcgaaaagatgtaaagcctatattatcaaaacctttggtggcacttgatttagaaacaactggattggatagtactaaagcagaaattatttcaattggagcagccaagataatgcccgacggacaattactgcaatttgaaaaattaattcgaagtgtggattcagtaccatccaaaattactgaacttaccggaattacttcagaacagttgcaaaaacagggtgttgagctttcattaggattagaggcattgtctgattttgttaaggattcagtcatcatcggttataatcttgaatttgatgaaaggtttttaacggaagcattgcggaaagttggaaaaaccgaatttactaactctacccacgatcttatgccaatagtaaaaacaactcaggagtttttagataactatcgtttaacgactgtcttggaagtatatcagatagagaatttagatccacatcatgcattatctgatgctcaagctacgttgtctttagcagagaagttaataaaaaacggcaaccttgtaatttgaaaatgcctatgtaaaggctttttttagtgtgctccccatatacatggggatgattccagcacgttcatggcacgcccaccttgcacaccgtgctccccatatacatggggatgattctggatcccgcacgattcttgagaaactgtctccgtgctccccatatacatggggatgattcccgaggcgctatcatcaattcaaaattcacttggtgctccccatatacatggggatgattcctgaaatagcgtcccgaacggccttaataatatgtgctccccatatacatggggatgattctaatagcaatacgaacattttcttcctcctagcgtgctccccatatacatggggatgattctaataaaactaagacggctgttatgaaagaaatgtgctccccatatacatggggatgattctacaaaaatatattatttcgggaatataagaaagtgctccccatatacatggggatgattctaatgctgaaaatgccggactaatcaatgctgagtgctccccatatacatggggatgattccaagtccagcgacgactgcagcaattgcagcaagtgctccccatatacatggggatgattctaacggatgggatggtattatcgctgttgctcagtgctccccatatacatggggatgattcccgctttggctgaatctaaaagtgcttgttcgtgtgctccccatatacatggggatgattcttaacaggcgacttcgcacagcttcaacaattagtgctccccatatacatggggatgattctagtatgagtgatagaaaaattgtactaacccagtgctccccatatacatggggatgattctggtacagacggtggaacttggatgaactacattgttggtaccactgataccacaaagagacattatgtggcaaccatcttgctggatgggttttcgcagcaaggtgtttatatccgccttgataatattccttcgacatccactattacattttcaaatatgaaactgcaattaggtttaaatgtggtggtctccaatctttctcaagccgtggatggtatgcgacttgatatctctaagaaaattgagcagaaggatctcaacggatatgcaacccaaacgtggacactggatcagattaagttaatttctgattcaattgcttcgttgaaaacaaaaattgacaatcttagtcaatgaaaacaataagaagtaacatccacagctataactgatgggtcaaaccatcacagcaacagacgatacaggtaagacagtaaaactaaagattacaggaatcagctaaaaagctagttccttttttttagtacaaaaatttaggagatgaaatatatatgtatggaacaccagttttactaccacacgcaggctttaccgattggcagtttgctatcgaacatatgggaagcaacactttactaaatacactatttattttaattattgctgatgtgattacaggaatagcaaaatcaatcatcactcatagtgtggatagttcgatcggcaaaaaaggattagcaagacacttcacgattattctgttggtcgcattgctttatccatggtcactagcgattaactaccaatggctaggtgactcagttttaagtttgtggacattcatgtatgcaacttcgattgtagaaaatatcggacaaatgggattgccgctaccgaagtttattaaagacaggctaaataaatttggccaagacatggaagattaagaaccaaaacaagaaaacgataacgtaaaggagataaataaatgaattttaatatcgataattcttacgaattaggagctaatgaaggctcatctcaagcaacaaacaataaatacattgtcctacacgaaacaacaaatatcggtgccaaagctaatgcaagctaggctcctatgtcaagaatccggacataaaagtacgaacaaatttgactttcaatttaaattacttaattacacatttggtttgtcgaaactttgttcagttttcaaaggtctacatcagatattagttaatcactcattaaattaaaactcataagcaacacaatctatcttatcatgtataaacccgaatgtcaacaactttttttaagtaatattcattcaacgttttgctacatgctcatctctcgacgacatagaatatcttaccatcctagtgggacaacgtcaatcactaatttgaaaaaaattcaaaaaattgaattcctgtataaatatcgaaaaaataattcatatcacccggattctcatccctaatctgcgctattgattatccctcataatacttttaaactgctatttgttccaattttatccaaattggtataggtaaacaaaaagatcctgcaaaattcgcagaatcttcacgtcctaatagaagtcttctaggttttcatagtctaatatcgcaatctttcgaccgtttcgttcaattagcgcatgactttctaactgttttaacttacgcgataaggtttcaggcgttgttccaatatatgttgccagttcttttaacttcatcggaatcatcacttcagtttctccgctcgctttagctaaatcaagtagataagtcacgattctggattcaactgactcgatattgattaagttcgcctgtttttccaaacgcgtcatcttatcagtagttgcttctagtaactttaaactaatttcgggataggctaacagtaactgttgaaaagcactccgcgataacgtacagattgtactatcttgcaagacctcaccgtacaacggctcatcttccgttttaaaaagtaacttttctccttcaaaatcaccgggttccatcatgcgtagcagttgctctttgcctgctgtagagagctgatagaccttaatgctccccttagctaagatcactaaccgcttctgatccatcgggttcatcaccaacgtcccttttttaacgcgttcatgatgggtaactgccgaaatcttgaccaaactatcacggtctaaatgattaaaaatcggtactatctcagcacaaatatgttgttcgtcagtcacctagcccacttccctctatcttaatcgtcgtcttcttcatctaatccttcgcgcgctgcttttcctagttggctttgcaattcacggatttggtgttggttgtagcccattaaagaaaccatatccgccgctaaagcaaatcgttcttctttttccgcaagtttaatcgcacgggaaacaaatagattagcagtattatagtccgcaaccatttccgcaatcatcgctggcatctcccagtacttaatccgcggctcttctgtcagcatcccatactcggtatactcagcttgcgtcgtcggaagcacttcaccttcgtctagtagccgttcggccgtcttgtctaatagcatatcattttctgcaagcaatgtggttaattgcgctttaaaagcttggttattgattcctttagcgtaccacttcatttgacggagtttacgccgttgaatcgttaagttagccatcacatggccgatcatggcacccgcggttggtgtatggtgatcaacatcagcttgtttaacttctgcttggtaacgtgtttcgatttcttcattagataacatattaattgccccctatttcactttgatactttgaacgctgtagcctaagtcagttacagcttgtgttaattcatctgggtttgtcacggcttcatcatattctgctttcactttactagcattaaagagaactttcactgattcaaccccatcttgttgactgacacccgcttgaatcttttgcatacatgacggacatgatagctcgtctaattgcatcaccaattttgccatttcaatgaccaccttttcgtttgattactgttactatatcgcgcgctgcatgattaaaaattgaccgccatcaagtttagcgaactttaaaccgaatcaggcgcatcgcattgaaaatcacgaccagaatactaatctcatgaacaaacatcccactagccatctgtacccagccaagcatcaggccaagcaataacaatccgaccgttccaacagcaatcacaatattttgaactgtattacgtgccgtcgccttcgtgaggtaatcggcatacactaattcggataacgtcgattgcattaacacaatatccgaagtttcaatcgcgacatctgtcccagaacccatcgcaattccaatgtcagccagtgcaagcgaaggactatcattaatcccatccccgataaaagccactttttgaccgtttgcttggtaggtcttaatgaattcaaccttctctgccggcaaaagattcgcgtggtattcagtaatcccgacggctttggcaattgctgcggccgtctggtcattatcgcccgtcaacatgactaaatgtttaacgcccgcttttttcaaacgcgttaatgctgccttggcttccggtttaacagtatcagcaatcccaattaataaaacaacttgttggtcaactgcgactaatacggttgattgccctgctgtttgactggccgtgatcgccgcaatctgcgcaccggttaaccggatccctgcttcagtcatcatcttggcccgcccaatccgaattgtttgaccagcgacttcagcttgtacccccaaccctttgagcgtttcaattcgttcaatagttggtaagtctgtcaccccttgttcccgtgcatactgcacaatcgcagtcgccagtggatgatctgactgtgcttcaaccgcggtagtcactgccaacgttgcttgttctgccgctgtataaaattgcacatgtgcaactgccgtgtcccctttagtcaatgttccagttttatcaaagaccatcgtatcaatgccagccatcgcattaacgacttcgccgcctttaatcaaaaccccatgcttcgcgccattgccaatccccgccacgattgaaactggcgcaccaattactagcgcacctggacaaccaagcaccagaatcgtaatcgcgagtttaaagtcgcgcgtgattaagccaatcgctaatgccaacactaaaacggccggtgtgtaataggtcgcaaaacgatcaatgaatttttccgcgggtgacttactatcttgggcctcttcaaccaattcaataatttgggcaaaagttgtatcatccccaacctgcgttgcggtaaccgtcaatgtcccgttatccacaattgccccggaataaacagcatcacccactattttcttaacgagttgtgcttcgccagtgatgctagcttcattgacataggcactaccttggacgacttgcccatcaaccggcacctgagcgccagctttaaccaatacttgatcatcgatttcgacatcatcaacatctaccgtcgtagtagtgccatcggccgctaacacttgtgccgtttgtggcgccatttcagacaatgcgcgaattgattctcgtgtctttttcaaggttcgttgttcaagatagctcccgaataaaaagaggaacgtgacaatcgccgattcattgaactcaccaatgattagcgctcccaataccgcaatcgtgaccagcaaatcaatgctgatgactttcacttttagcgcttgatacgcctgcatcaaaatcggtgcaacccccatcattgacgcaaccaataacagcccttgcatcacaattaccgccccaccaagccaataccagccataggccactgcaatcaatccgccaacagtcagcgcaatctgattcttcacggattgtaaccatctttgaaatttcatttaaaatcccttcttcctaacgattgtctttagtatagaagaaagccgattttaagaacttgatggttatcaagtttacccgaatataacagacaaaaaagcacaatcaacgattgtttcgtcgattgtgctttttcaattcgattaggcttcaaacccattttgatcagcgacttgcttgaaccaatgacctgattttttaatcgtccgttggcaatcatggtctaagtccaccgcaataaaaccgtagcggttcttataggcgttggtccatgaccagttatccatacacgtccacatatgataaccgagacagctactcccttcttggagggcttgatggacatacttcaaatgatcctgtacaaattcaatccggtagtcatcatcaatctggccatcggcattgcgataacgttcttcgccttcaacgcccatcccgttttccgaaatgaagcaagcaatgttgccgtaattttcgcggacgttctttaaaatatcgtaaatcccacgttcgtagatttcccacccgcgatacggattgactttcttacccggcatatcgtaattgtcgaaaaaatcatccggcatcgggccgtttgtatggtcgattggggtttccttggccttcacgcgccgtggttgataataattaatccccaataaatccacagtattcgccttaatcactgccaagtcagctggttgatagtcgggtaagatggctagatcttttaaaatcgcgaccaaatcagcggggaattcccccttcacggcaggatctaagaatgaacggttgaaaaaagcatctgcaacttgtgcggctttcacatctgccggattagtcgcatcccgaggataacttggggttaagttaaggataatgccaatttgtcccccttgattgcgtgcgtgatatttttgaatcgccatcgcactcgctaatgtttcgtgataaccaacttgtaccgcatgcgctaaattaatttcagctggataatggaactgatataaatagccgccttcaaccggcacaatcggttcattgtgtgtgaaccatttcttcacccgatccccaaataattcaaaacaggtttcagcataatgaacgtaagcatcaatcgtctcacgattgagccaaccaccttttttctggagtgctagcggcatatcaaaatggtataaattcataaacggttcgatgccgtttgcgattaattcgtcgatgtacgcattataaaaatcgacagcttgtagattaatctcccccgtaccttgtggaaacaaccgactccattgaatcgatgtccgaaaactattgtgtcctgtttgtttcatcaattggatatcacttttgaattgttgatacacatcagaggtccgcgctgggcccacttggttaaaaaacttttctggcgcttgttgataccaataatcccaaatattatcgcccttaccatcaccgtcaatccggccttctgtttggggaccacttgctgctgaaccccaccaaaaatcctttggaaagtcataaaaagtcatcgctagcactccttcttgtttgaatagcctcagtatatcagcttctttttaaaaaaccaactcttttatttaaatgtatagacttttcaaaaagagcgtgctatattgagaatgtaatcgattgcaaacacatgtaaaggacggtgctctacgtgaatacttttatggacacgcttagcaagaaaatcatgcctttcgcaaataagttaggccaaaatcgttacctaactgttctacgagacgcatttatgctttcattcccattgacgatgtttggatcaatcatcgtcgttatcactaacctgccatttttcaacgatgccaccaaagcgaccctaacggaactccttggtaatggacaaaatgccacaatgtcaatcatgacggtcttcgtcacattcgggattggttattatctttctaattcatatgatgtggacggaattttcggcggtgctgtttcattcgccagtttcctaatcctcaccccattcatgatgaccaccgataaaggcgttgacgttagcggtgttttaagtctcgatcgacttggcgctaaagggatgttcattgggatgattgcggcatttatcgctgcagaaatttattgccggattactaaaaaaggctggcaaattaagatgccagacggtgtcccacctgcagttgcgaaatcattcgccgctttaattccagctattttaaccttaaccattttcttagtcattcaagcggcagtcactggtttattccacgtaaacttgcacgacgtgatctatgaaattattcaaaaaccactcgttggtttaggtggcagtcttcctgcaaccctaatcgcattgttctttgtccaattgctctggttcttcggtcttcacgggcaaattatcgtcaactctgtaatggatccgatctggaacacattaatgctcgaaaacttggaagcttacaaagctggccatgctttaccacatattgtcacgaaaccattcatggaaactttcaccgtaggtctcggtggttctgggatgacattagccgtcgtcttactgatggcctttatcatgaagaaaaaacaataccgcgatgtcggacgtttggccttggcacccgctgtcttcaacgttaacgaacctgtcattttcgggttcccaatcgttttaaacgccacaattttcattccatggctgattgcaccactgattgtcacagcgctcaactacactgtaatggcaatcggattggtgcctacgccaactggggtttcagtcccatggaccgtcccaatcttcttcagtgggatgctcgcaaccaactcagtactcggcgggatcttacaactcattgacgttgtgctagtcggtctcatctggttcccattcattaaaatgctagatcgccaaaaagaccctctcgcaaactaaagattgttttaccccgttgtttccactaaactataagtagaaagcggggtattttttttgccaaaatacgaagaaattgccaacattattcgacaacggattaaacaagggcgctatcctgctaatacgttgttacccaatcaaaccgacttagttcaagaattcgatgccagtcgaatgacgatcaaaaaagcaatcacgattttaacgatggaaggactcgttctatcacgacgcggcgctggtacaaaggtgttagaccactctttttggaataaatcaacggcaccggcggatcaataccgtgggatgtcacgtgacttagccgacattggtaaaacactctcaagtaagatcatcacgtttgaggtgactttcccaacacctgagattaaagagcgcttaatgcttgctgatcaacagcccgtctacaaaatcattcgactgcggattatcgacggcgttaatagcgtcctcgaacatacctacatgccagtgagcctagttcccggattaactgatgatgttctcgcacagtcaatctacacctaccttaaggagaacctacacctcacgttcgcgggcgcctttcgtaatattcaagccgataaggccgatgaatatgaccagcaatatctggactgcgccccaactgatcccgtcttagaagttgagcaagttgtttatctcgataatggccaaccgattgaatactcaagaagccgcaaccgttatgatcgccgcggttatacattcttagacgttaagaatacttaattgcactaaaaaaagcctgccagcatttagctgacaggctttttctattgattatttttcgacatcttgtaatttttggttgtcgtctaattgtgagcgaccaccgttgccgattttttgtaaatgattcattcctaaccataatagcaagagtgctacgatgatgaaggctaagagaacaaagaatgattgaacaatttgaccggtacctaaaccagatgtaattgcttctctgagccctagaattgaatacgtcattggtaagaatgggtgaatgacgttgtagaagtggttcgtgatttccattgggaatgtaccacctgaaccccctaattgaagcatcaagaggaccattgctaagaaacgaccaggattatcaaatgtcattgataagaacataatgatcgacatcgaagcaagtgagaaggtaattgccattaggaagaattgtgctggatgatcgacgtttaatccagcaaccatcattaaggcaggttcgataattgccatcccgacagcgactaaagcgccaaccgtgattttacttaagaaccatgctgttgatgattgaccagtcattgagatcttccgaattggataagcaaagttgaagacaattgcgccaacgaacaatgctactgaaaggacgtaaggtgctaaggcatgaccgtagttaggcacatagctgtaatttgaatgtttcaattcagcaggtgcagcaaacatatcggctgtcttatccgttaattgaattgagttaacttcatttgcaccagatttcaatgcagatgctaatgtcttattaccatctgttaattgaccagcaccatctgttaacttagctgagttatccgttaattgatttgtaccagcagctaattgatcaacaccgcttgttaacgttggaatttgaccatttaattgaccaagaccattgttcaaggctgttgaaccagttgctaattgactgataccacttgtcaattgaggtacttgggcatttaaagcaccagtaccggcagcaagttgttgtccaccagctactaatttagagctttgagctgttaattgaccaacaccgcttgttgctgatttaacaccgtcagtataaccattaattcctgttactaaggtattaatctgtggtgtcatcgttgattgactagcaatccccattactttattactaatttctgcttttgaagttaattcagctgcattaattgctggcgtattattaggaccatttacaccttggtttaattgcgttgcaattcctgttgcttgagttgatgcagcattcaattgagcgataccagctgttaattgttgcatttgaaccattaagccagaaatttgatctcgcatttgttgattcgttaatgcgtcactcattgttaataattgttgtgacttcgtacttaattctgttagttgagcaacagcgttatctaattgacccatttgaccaagtaatggcgttaattggttaatcatccctgttatttgtccaacatttaattgttcacttgctgcagcaattgtttgcactgaagttaagtttgaacctgccttagcctgaatatcttgtaatgctttttgacttgcaggacttaagttagctgaatctgcactaattgtttgtacgtcagctaatgttgtctgcgagttaccagcaattgtattagctgaggtattcaatgttgtttcaaacgctgataattgagaacttaaagctggcaattgagctaacgctgctttattttctttataggcattatctaattgaactaataccgccatacttggttgcaattcgtttaacattgttgctaactgtttagattgtgcgttaacactcttcatcgttgcaggcatttgggcaaatttttgcattaaatccgtttgattgcttaattgagtattaatttgaccaattccttggttcatcactgaatttaaaacatataagcctgcgacaccggcgggaagttggcttgttgaagatgccaaacttgtggcacccgagctaagttgatttgagaagccattaagcgtgtttaaaccagtgcccaacgcgccaactccgtttgtataagctgtaacaccactactaatttggcttgcaccatcattcaattggcttgcgcctgatgcgagtgcacccgtcttgctatctaataatagtaagccgttgttaagtgtgtttgagccatcagctaattgtttaacaccatctgataatggcacaacgcttgttttcatcgtcatgataccatcgttgacttgagcaacaccggctgtataaacatttaaaccatctgataacgttacagaaccgtctgttaattgtttagcacccttggcagcagtactgaaccctttaccggcagtcttaacctgtttgaacatcactttagcgtaagcatttgtgacagtttcccgaacttgggcgttcaattccttggcacccatttcactgataacttcaccgatgaagttcaatgaatcgttggttttgtattgaatttgcatcttcttaggattcttatccaagactgtagcagcattggcagagaagttcttaggtagggtcactacagtgtagtattccttatctttaagcccttgttgtgctttttttgctgatacgaaacgccaaccaagttggtcgtttttcttcaattcttttaccatatctttaccagcgctcaacgtttcaccgttgtaagtggctggttgatcattattaacgacagcgactggtaattcaccagtgctaccataaggatcccagacagatttaaggaaaaagatactgtacaagaatggaataaacacgattgcgattaacgaaatcatgattaaacgattcttggcaatgaacttaaattcgttttggatcatcttcatgctaaaatctcctttaattatataagttgcttaattgattacattcaatatccacgataactaaattagtctaaccttttttcatttaaatttcaagtcttatgcgccaaactattctctattcacaactgtttctaatctaacaaaaaaagacggtcgttatttatataacaaccgtctcccttatggaagaaacaaatgacttcctattaaattaattattttgtttcaatcttcgtcatgccgcccatgtatggtaccaattgttctgggattgtgacgctgccgtcttcgttttgatagttttccaagatggcggcaactgtccggccgactgctaagcctgaaccgttcaatgtgtggaccaagttgacgtggccatcttcgtcacggtaacgaatttgggcgcggcgtgcttggaagtctgtacaatctgaacaacttgagatttcacggtacgtattttgagctggtaaccaaacttcgatatcgtatgtcttagctgatgtgaagctggcatcgccagttgccaatgtgatgacgtgatatggcaagttcaatgcttttaagatattttcagcatcggcggtcattttttctagttcattgaatgattcttctggtttcgtgaatttcaccatttcaactttgttaaattgatgcatccggattaaaccacgggtatcacggccggcacttcctgcttctgaacggaaagctggtgataaggcagtgaagtagattggcaattgtgcgccatccaagatttcgtcgcggtagaagttcgtcaatggcacttcggcggttggaatcaaagtcatgggttcgccttcgttggtcattgtgtaaacatcttccgtaaacttaggaaattggccagtcccaaacattgattcgccattcactaagtacggcgtaatcatttcttcatagccttctttagcatgttgatccaacatgaagttataaatggcccgttcaagacgtgcaccggcacccttatagtaaacaaagcgactacctgatactttagcggcgcgttcaaagtctaagatgcctaatttttcaccgatatcccagtgtgctaatggttcaaaatcaaattcacggggtgttgaccatttgcgttcttcacggctaaaactttcatctgggccaacgggtgctgaatcatctgggaagttgggtaagcggactaagatgtagtccactttggccttcacttcagccaattcgctatccaaagccttgatttcggccccaacattcttcatggcagcgatttgttcagtcgcatcttctttattgcgcttggcaacggcgatggcttctgaggcagcattgcgatttttcttcaattcttcggtcttcacaattaaggcacggcgtttttcatctaatgcgatgacctcatcaatttctgcagcttgaacaccgcggctagctaacttatcctttgcccattggacattttctcgaatgactttaatatctaacattgcactctctccttttaatgatctttaattaacaacaataaaaaaagccttctcatcccttaattgggacgaaaagacttcaattcgcggtaccacccaagttcacccactacaaataataggtgccctcaattactgataacggccaggaaccgtgtagttcatcactacccactattgcgctggaatgctggattcaataccttccaccaaccggtatctctctgtcaatccatataggcgcttattcacgtgtttacttcttaatgtaagaataccgcatttaatctttaaattcaatcatcaatagatgatttttgaatccatagaccccgtaataaaccgagcatacgtccaaaatgatcgctatctgcattttgatgccatttaaacatcaccgcttctgggttaacgatgccagttaaatcaatgctcgaagtcgtaaccaccatatcagcatccattaaatccgcgtcagattgactaacatccacatacaaaacactattcagtgcagtcatcaaatcaaagtacccgaggaaggattgttccgtcacaacgacaaccttcactttattcatcggtgcaaaccgttgaatcatctgacgcaagacgttgtagtaaccactgaccaattcttcacgtaatttgactaagaatgacactttcggattgattaataagtaatccaccgtatcatcaatattttattttaggacatcatttggcttgagatattcaacactttccatcatttggtcagcgagcaccgatgtcacatcttgtttaaacatgtaagtggtcatcgtcatcgaaatcatcgtttgcacgaaaccttgataattcgcatcgtctaagtttaggtatttcttgatatcaaatggaatttgatcaataaaagcttctacaaattcgtaaatcactggaatataccgcttgtatcgcgtttcgtaagattccatgtagggattagcatcctgaatctgaatcggtccaaaattaatgatgtcatatatattgaatgattcagccatcgcttcttcttgggtcatttgtgcaagaatgctcttgatccgtaaagcttggtcttcaaagggctattttagatattcagaaaccatattgggaactggataacggataaaatcgccatctagttcagttgaaaccgtgtgaccttgtagtaatcggaaataggttacgacgattgaatacgcccctagttcacgggtcaaaatattggttttttccaattggaaccgatcaatcgcaacatcgaacgccttaagtgcatcgtctcgtttaacatcttcaaagggccaggtatgcccttccgttgccatccagaataacatcgttaagactaaatgaattttactttcgtcgccttctaaccgaagtgaatcataatacatacggatatcaaatgagcgaattaagtcgcgcaccccttttaaatggcgtagcgccgttgccttactcgtatcatgggcttcccagaattcttggaatgtaacggtctcacccttgagtaagattttgataaaatcaaacgcttctgacttattcactaataaatagtgataggcatctgttggaacgctgaacaaggttttaatatcatcaacatccggtccgataatttcctttaggtccccaataatgctcatgtacatattgtacaagctaccgtaactgcgatttaatagcattgctacttgttttagattcacatcttcaacgagcggctgattattacgcgatagttcaatccgctttttaacaggcaactcatcccgttttaaaccaacaatctccattaataaggcgtacttatcattttccgcttgcgttagaaaaatactctcacttgcgttcaaaccgattccccctagtaaaaatccttataaaaataaaaaaacttcgcctacacttaaaatttcaaatcccttgtatctcattagggttctacaattttaaacataaacaaagtttttcaacttttatcatttaatattcaacgaattaataaattgataatccacatatcggccttctccactattactattggaataacgactgattaaataaatattcttctgcttcagtttagcatcgagagaaactttaatatcgaagccactctgcgccgcattatcaacagttggatagacagctgcgacatcatttcgagtaatcctattaatgcgaacccgtccaatttctttattatttgctttattcattatgatgataaaattattatttaagccttgaacgttcttagaaatatgccatcccgaaatatggaggatattaccattttggataagttgatcaatacttcctaaattacttgggccttgtggtacgttaacaacattaggaaattgatagtcaacataatcactgttaccattcgtggtacttgtatagcgactaataacgtagaaattcttgccttctaaactcttatccaccgctaattcagcactaaaaccactcataccagaattatacacattaggatatacactatgaacatcatttctcaatgaattattaactttcaagcgcttaatttctttattagtatcgacattcattacaatcagataatgcgtattttttccttgtgcataatcactcgcatgccaaccattcattgaaattttatttgaattaactttaacgttatccaaactacctaaattttgcttagttggcgcaggaacttttacagtattaccgaaatcaaagtcttttgcactcccttcaccgcttggtaattgtgcataacgcgatataaccctataggtatgtccgtacattcctgagtctactgggatgttggcattaataccactcattgctgccgtgttaatagacggataggcatttgctacatcatctctcctaccacgattaattgcaatccttttatgttcttttcctgtattggtatcaattagaattaaataactgtacggtaaattattggcatcattaattgcatgccaaccaagcgcaaggatattattgctatttgcagttaattgatcaaggctaccgacattatccgttacttctcgatcccaacttgttaatccatactgctcaatcaaactgtttaacaaagtatcatagttaggcgctgtagcataaccgtcttgtttcaaaagactcgttacctcacgataattagttttccacaacaaattatgatatcgtgaatttactgccaaaaagttcccatgatcttcgatactttcattccaactattgtattttctaaattgcgcattaactgtaatccactgaccattaatatattcttgagtgggcattgttacgtactgaccattgtatgttcccttaattccaaataagttattaccatacgttgctaaagtcgattgcccccaaccgctctccaagattgcctgcgcacctgaaacagagggtaatacaccatacttgcgccatgacgaaattgcaccatcatgaatactactaataaaactggaggtatttcgtaataaattcattgaagctctggaggtatttcgtaataaattcattgaagctggcgtacttctttgacttactttaggcgcatcataaaacccaggaccaatttcattattttgctttacagtaacttcttccttgttctttgtttctgctgctgattcactatttttaattacaccggattcagttgaattatcggtagatggcttttgttctttagaactttgactacttgctgatataatactttcattactgctcattaatgcaggggctgtctcttgtttttgttcagccgctgatactcgttgatttgttgttaagccaattaaaccaatcgtactcattaaaatactattcttaacaatttttttcacttcacaagtcgctcctagttagttttttcagacatactaataatacaatacaattacttaaaacactatttcgttttagttacaaataaaaaccgaacatcttatccacacggttaagacgttcggcaatattttttagatgttcaaggcattgtcaaacacgtaatcaaccgtatttccctcacctgaaggattatctgaataacggctaatcacatatattcttttgttaaccaaactgttatcgatattaaacgttaaaccaaatccactgtttttagagccgtataatgttggatagacagcagctacatcatttcttaaagaacgattaattttataacgccgaatttctttgtttgttgtcttatccataataattaaataactatacggtttattaatcgaagcattagcagcatgccatcccgacattattacggtattatttacacgagacaattgatccatacttgcagcactttcaataacttgtttcttaggaactccaatttgattaatgaattgataatccacataatcagcatcagcatttgccgttgctgaataacgactaatgaagtaaatattcttgccttgtaattgactgtcaactgggatatctgcagaaaatccgctcagccccgccttatatagatcgggataagcagcagctacatcatttcttggtgagttggcgatagtcatccgtttaatttctttatgtgtattagcatccattacaattaaagtgtgaacattacggccttgtgcattatcatttgcttgccaaccgctgatgtgaacattattgaaacttgccgttagggtgtcaatactccctaaattttgtttaacaattgctggtactgttacctgattatcaaacgaatagtctacgtatgctccttcgccatttggtgtacttgagtaacgtgaaattactttatacgtattaccgcgcatatcatttgttactggaatactcaaaccaaacccacttttttctgcattggcaatattcggataaacttgtcgaacatcgtcacgttgcgtacggttaattgcatagcgcttatattcacggcctgtcttagcattaattacaattaaataactgtatggataccgactagaatccactgatgcgtgccaaccagacattgataatgtcttcttatcagcagttaatgaatccatacttgctacactggtttcttgcttaggtactttaataatatttctaaatgtgaaatcaacagtgtcggtattaccgttgggatctgacgagtagcgagacataagaacgtaactcctattatgcatattattatctaatgtcaatgtattgttaaatcctgaatgtaatgaattggtaatgttttcataaatgttatgcacatcttgacgatttacacgatttattttataccgttttacttctttatgtgtcttactatctaataagaataggtagctatatggccgattggctgtttgctgtgctgtatgccaacccaccacatgaatttcattttcagacacattaacactgttaaggctcgctttatttgcaggcatttgatcataataatgttgcactaatgcataaaattgattcatgtcatacccatattttgcaaagtaagcatctggatcagtatggtctgttccaccaagatattgtgtaacattatgatgtgaccagattgtaccaaccccattatgattctgtgccaaagatggcgttaaattatatttgtttaacaagtaagcagtgtaccacgctgagtaactcgttgtcttagcaaaatcttcgaagttacgagccgttaccatttcaaattgggcaaaatatttattaccaactgccccactaccccatgcaccataatctgtatcatgaatgtttaatattgtcctagcatcaataaaggtatgaacaaatgctgattgccacccaccattaatctcatagtctgcttcactccgagcactataattattagggttatcagtataatgaacaaccactccgttaggacgattatcatctgttttataattaaatattgagaatgtatgcaaatcttgcgtaatgtttggatgtaagtagttgtgttgatatatataattattgacacttggataacctgctttaggcataatcgcctttttaaccttagatgaatcaataggcatcccaatatcgtcagtcttcgcttttttctcttttataggtgttgcttcttttgtatcttgactatttagttgcgttttcatttcatctggcgttagcacttgtccagcttgaacattgtttgtagcaaacaaaaaggtcgccgagaccattgtaaatccaattaagaacttcgttagttttctattcattttttcccctctagaatccttaattaacttccacgtagaatattaacataaactttaatatttttacagtctgttcagcattattaatcatataaacatttattggctattaatcaaaaaaaacgtcctgaaccttatcggttcaggacgttttaattatctttccaaataaaactcaaatcgttcgcccacatattgggtgcggacatattcgaaaggttcgccgtttgataagaaggaaacttgtcgtaatttcaagattgggccattacgcttaatgtcgagatattcggcaattcgttctgaggcgagttgggctgagacggtttgttgtgcaccgcccatttcgtagccccctttttcggctaatgctttatagaaggaagacgtgatttcagctttactgaaatcggcaactaagctttgtggcacggttgccacttcaaaacagatgggcacattgtcggcatagcgaatccgttccatgcggagcacctgctcgccatcttttaactggagcttttcagcttcgctaagtgatgggttggcaatgtggaacgaaatggttttactagatggctgcttaccttgggcagtcattagatcggtaaaactagtgacgccggacattttttcttgcaccttttggttagcgacatatgtcccagccccaatacggcgttccaaaattccttcgtcgaccaatgtttgaacagcttgccgtaatgtcattcgtgagacttcgaaatttaaagcaagctcccgttctgaaggaattcgatctccaatcgaccacttgccggcttcaatatcctttttaagttgattatgaatttgaatataaacaggtgattccatgggacacactcctaaatattaatgttgatagccgttcccaaagctgtaagttgcgactaagttttgctgatggtctaagatgttgaaatcagcatcccgaccttcttctaatttacctttttgtgttaagccaaattcttcggcttggttgacacttgacatcataacggcttcaaacgtttcacaacctgtgaatgtttggatgttcttgaaggcatcgatatatgttaacactgatccggctaaagtgccatcttctaagcgtgcttgtttgtctttaacaatgactttttgaccgcctaattcgctttcgccttcagcaatccctttagcccgcattgaatcagtcacaaggtcgatgcgttctgcacctttttgttcgtaagctaatttaatcatgtcaggcacgatatggaaaccatcagcgattaattcagcgtacatgttgtcttctaacattgcgtgacctgtaacgccaggttcgcggtgcttgaattcacgttgggcattgtataaatgggtaacgtgcgttgctttactttcaagcatttgttcacgcgttgcattactatgaccaactgaaggcacgatgttgtgtgctaagcagtagtcttcgaatgcttttgaaccaggatcttctggtgcataagtaattaaacggacacggttacctgataacttattccattcgtccaataaatcaacgtctggatctttgatgaattgttctggttgagcacccttgaagattggtgcgatgaatgggccttccaaatgaacaccttgaattaatgggttcttttcagccgctgctttaacaccgcgcatagcattagcaatgttttcgtttgattgcgtcatcgttgttgcaaataaggttgtgaccccttcattttgcatcatcttagttgccatttcgtcgatttggtcagcatcgccgtccattgcatcaaaaccataaccaccgtgacagtgaacgtcaataaagccaggaatgattgtcttgcctttaacgtcttgaatttcttcgccagcttgtgccttgtagtcgaacattgggcccactgccaaaattttatcatcgaaacgaatataaccgtcttcgataacgtcgtcacctgtatagattaccgcatgttttaatacttttactgccattatccatccacctctatctttaaattacctctagtataaatggtatagaccaaaaaaacaagggattccgactaaactttgaaccgttttcttgttaatttgctatactatatttatccattcatattaaggagtttaacgatgttaaaaatcggtgttattggactaggaaacattgcacaaaaagcatatttacctgtaatggcgcagatgcaagaccgggttgattgggtcttatgtacgcgccaaccggctaaattagcgcagcttcaagcgcaatatcatttagaaagtggctgcctatcatttgacacattactcgaacaaccactcgacgcagttttcattcacaccccaactgcaacccactatcaatatgttaaacaagccctgctccatggtttacacgtttttgtcgataaacccttaagtgaaaatccactggaagtcgccgaattatacaaactcgcggctagcaaagaacggctcttaacggtcggcttcaaccgccgttttgccccatttttgcaaaaattaaatcacttacccgataaacaactgatcaacatcactaaaacacgcgtggcaacgagccaaccaacgccctttgccatttatgacctgatgattcataccattgatacggcgcttttcttggctgattcactaggtaccaattacaaaatccgtccatactgtcagcaggatgcaaacggcaatttacaactcgcgcaattaaccattgaaacaccgcgccaattaatcagcgcgactttaaatatgcaaagtggtaccaatcaagaaattgcaagtctccagacaccacacgggttattcactgtcgataatctaacgcgctacacaacacaagcggcagaagacagtcgtattcaaactgcagctgactggacgcctacgcttgaaacgcggggctttgcgccaatgattgatgcgtttattactgcccttgaaactaacggcgcaaatcctatcccactagaaagtagcttactcacccaccaactctgtcatgagatggtccactttacaaaataatataaaaaagcgtaacccaatacagtatttgtatcaggttacgctttttacatgcttgagagcactctatttttggctttctaaatccttcgcaattgttgcgtcgatgcctttaaccaccgctgtcattaagccggcttcttccattgctaacaagccagcaacggttgtaccacctggtgatgaaacttgatccactaagtcccaaggtgaatcatcactcataagcacgttttgggcactccctaaaacggcttgagctgcaatttcggttgcggctttctttgttaaaccgtgtttaacgccggcccgcgccattgaatcaatgaataggtaaacaaatgctggtgaactaccggcaagcgcactgaaagttgtgaaatctttttcgccgatttcaaccacgccccccagttgtgcaaggacatccttcacccgacccaattgctctgcattgacttgttcgttaccaacaacagctgttatccctgcgcgattggccacgttaacatttggcatgatgcgtagaattggtaaatctgcagcagattgttctgctaatttatcaagtgataaacctgctgccattgaaaccatcaatggttgatgtgctttaaaggctgcatttgtttctgctaaaacctgtggcacaatatatggttttaccgctaaaaaaacgatgtcggcttgttcaaccactgaattgttatccgcaacagctgtaatccgttgttcagctacaaaatccgcatagttcgccggatgtccgccatgcactaaaatatccgttgttgcgacttgattagctttcactaagcctttaatcattgcttgtgccatgttaccgacaccaataaatccaattttcattctgccacccctttttttatttatccaaggataccgaacgagcggaggaaagtcaatccaggacacaaaaaaagacatcttagcaagatgtctttaaagtattgggctagctggattcgaaccagcgcatgacaggatcaaaacctgttgccttaccgcttggccatagcccaatcaagtggaggagagtggattcgaaccaccgaacccgaaggagcggatttacagtccgccgcgtttagccacttcgctactcctccatacgtttcatctcatcgattcaactatattagtttacaaaattctgacagaaaaatcaaccccaaaatgcaaaaaaaatcttgattattgcataaataatcaagattttttctaatatttagttaacgccttccattaacttatgaattggtttaacgaagaagattaagacgatcccgaagatggcactcacaatcccaatccctaagaaatatctaatttctgtttgtggtgaatataaacgcacaagctgtgcattaattgcttggcccgcagcatctgctaagaaccacatactcatcatttgtgattggaatgcctttggcgctaattttgttgtaattgacaacccaattggtgaaattaacatttcagcaatttcaacgatgaaccatgaaccgattaaccagaatgggctaactcggccagcggtaccgtgtaataatccaggaagtgccataaacatgtatgataaaccagcgaagattaaaccaacagcaaacttaccaggtgcagatggttgtttcttccaagcactccataaccatacaaagaatggcgttagaagcataataaatagtggattcaatgattggaaatttgatgcagctaagctatgcccaccaatgtttagaattgtccgatcttctgcaaataaggctagaacaacggagccagattcttcaattccccagaagatagcagctgcaataaagagtggaatataagctataacgcgtgaacgttccttcttagtcactttcttgctgcccaacatccgtgagaagtacacaattggtaatgcaatcgcaatgattgaaatcatcaagacgatgttatcaatgtttaagttgcctgtaaattgcatgcctaatactacggcaacgacgaccacgacaccaatcacaattttacgaataacgcttgataattcttctggcgcaattggatcattaggttttgaattttctttactgaattgagaacgaccgcggtagtattggattaaaccaaagaacatcccgacagcggctaatgagaagcctaagtgaaaatcaattttttgaccgacagccccaacaagaattggagcgacaaatgagcccaagttaatcccgaagacgaacatactgaaaccagcatcacggcgacgatcattttcactatacaaactaccaaccatttcagaaacgttaggttttaataacccagtccctgcaacaatcaaagcaattgaaataaataaagctgtcgcacccatcggcattgctaaggcaatatggcctaacataatcaagacaccaccgatgaagacggttttgaagctcccccagatccgatcacttaaccaaccaccaacaacgctggctaggtaaaccatcgaaccatagattgccatcacagacattgcagtcgtcttgtcaaagccaagaccacccttatctaaagcaaaatacatatagaataatagaattgcacgcatcccgtagtagctaaaccgttcccacatttcagtgaagaacagtgttgatagcccatgcggttgcccaaagaatgttttttcttgtttctcttccattgtaataccccactttaaaactttattattacggaaactaagaattcgatagttattaaattgaatcgactcatctatacaagaagtctcttatcattcgcttagaatctataagggctattataatcttattttaatcttaaatcaattcttttttcaacattaactgcattgtttgcactgattttttcattaaaataagttattttatgattcaaaatgactaatgcttattcttaaatgagaaaatgctcatgatacctaacatgttcttagaaaactggtttgttgcctttaaacagtagtacaatgaactaatagaaagcgagctgattccgatgaacccttttacactaacatctcttattccattacgacctgatcgttggctaacttactacgaagcaatgtatcaaaatgaacacggcgatttaatgccttatcattttgtcagtcgtgactctaacttaaccatcgagactttaaaacgaccagctaatgcctcagcggttgcaatgttctgctacaatcaaaatcactcacaggtcttactgactaaacaatttagacagccccttaatgattttgtctatggtaatcccgccggtttagttgaaccaactgagtcgattaaacaagccatttcccgtgagttaatggcggaaacaggttactctcttattgaggttgaacattgctttgcgccaagttattcctcaccaggccttactgatggcgccgttagtctagcaatctgtactcttgatcaagctaaacaaacagaccgtacacttgaagtggatgaagccttaagtaccctgtgggttaatcgtgctgaagcacagacgatcttagccaatgaaaaaatgactggacgcactcagattctattatggcaatgggcaaatgaacaataagtaatagccagttacgattttcgtaactggctattttagtggttgcttttcaatcaaattgaatattaaaaaagcattatactaacaaaacgtcagtacaatgctgattatcccgattagcacttggtagaaacatgctattgatgccggctgcaggagtcgaacctgtgaccctcggtttacgataccgatgctctaccaactgagctaagccggcattattgatgacccgtacgggatttgaacccatgataccgccgtgaaagggcggtgtcttaaccacttgaccaacgggccgaaataaaaaacgattgaaaattctcaaccgttcaagaaaatgttacgtaaaaaaattcaagccttatacgctaaaaagatgctgaaccaaattatcaaagaggtcaatgtcaaaccgctcgtttatgaaattgtcgatgcaagtgggactgaaaccgcggttttgctaagtcatgagcaatgggtcaaaatccaagccgcgttaaccgctaacaagtagcgtgaattcccgatttagacttaatacggtaactaagctgtaacatttctgtaatagttgaatgttacacttgttcttagttggaaaaccgtacataagttaagtatttttaaaaatgataaaggggaatcattcagtgaaaaaagtcagtcgattaatgttcagtgcactagcattcttaacaattgggtcaacaatggcggttagcattggtgcagtcagtgccgatgaagttgctgatacaaaagcatcaatgacaaaccttagtgctgaaaactcggctttattagctaagttaagtgctgcacaaaataaggttgcttcaatcgatagccaagtgtcaaataagaccgttgcaattgatgatgcacaaaagaacattgcatcaacggacaaagaaattactgaagtggctcaaaaaatcgttaaagttcaagctgaagtccaatctagaaaagctgttttaaaagaacaagtaattgcgcttcaaaaacgtgctggggatagtgtttctggaaatgtttacgttgacttcatcgtcaatagtgatagtttctcagatatggtcagtcgtgcttcagttgttggcaagttaaaccaagctaacaaggaagcaatggacgccgtagcgaactcagaaagtaaattagctactttaaaacaagaacaagtgactaaaaaagcaaacttagttaacacaaaagcacagttagaaaaagatcaagcacagttaacatcacttaaagcagatgcagaaaatgaacaagcaagtttccaacaagaagtggatggacataagacacagcttgctagcttacaaagtcaattagatgctcaaacagcagccgctgttgaagctgctaaaaaagaaactgaaaaagcaacaatcgcaccaacggttgcacctaaaacaggttcagacaatacaccagcaccaacgcctgcaaaaacaacgacagttgcgccatctggtgcaaacactggttcattagttggcaatgccttacaattcattggcacaccgtatgcatggggtggcgcacaacctggtggttttgattgttctggtttagtttggtacgctgctaagatggccggcattagcttaccacggacatcacaagaacaaagcacggttgggacaaaagtgtcattatcagaattacaacctggtgaccttgttttctggggtggcgttggttcagcacatcacgttgggatctatatcggtggtggctcatacgttcacgcaccaacagaaggccaaaatgtaacaacgatgtcaatgcaatattacaaacctgactttggtcgtcgtttataagattaaataaaagaataaaaaagtttggcgtctgcttaaattaagccgccaaacttttttatttatttaaatcctgaatagaagagtgtgaatgaatagtgacaaaacaactattagtcattacgggcgccacgggtagtggcaaaacaacggtgagccattatttaaaagaggcctttcaaattccacaagtggttacccataccacgcggcctagacggcataatgaagtcgacggggtggattattattttgaaacaccagacaccttggcacaaaagcacctcgttgaatcggtgagctattctggctatcaatatggctcttcacatgaagcgttagatttggcgtggcaaaaagcacagctgattagcctagttgttgataccaaaggggcacagacttatttagagacgttccccgaagaagcatcggtcttgttcttaacggtttctgaaacagatgcgttgattacgcgccttgaaaaacggaaggatagtcctgaagcaattcaaaaacggattcaaagtgctgaatttaagcgggatctgatgttaccgagtcatttaaatcaacgggcaactgtgttggttaacgatgactgggaaacaactaagcaagccttagcaacattaatcgcaaccctaaaaaattgatcattgaaaataaaaaggaagcctgtcgaacgcgttcgacaggcttccttttaacgtatggttaacccttatgcaaatgagtgttggttaaccgaattggttcgtttcactttataactgagtttttgtacggcttgttcaattgtaataccacttgcgctgattttttcattgttcgttgcagttgcgataaatttttgagtttgcgtatcaagtgaaacatgataccaattattagtttgactagtaaattccatcgtaaaatctcccttcaaatgactataaatactgatagaaggctaatgaagacgatttcttaaaaatcatctgaattacatcataacgcgcagcctgagataatgcaactattttgtattcggatttattaaaatttggtgaaatttagttgtgcttagctaacggttatgggattaagggtataatggtaaatagtgtggggtaacaactaaattgaagttggtagtaacaagcgccagcgcctgacaacctagaaagcatgtgctagaatggcgtatcgattaatcgagaggagcggatgtattaaatgagcgaaataaccactgccattgccgtattacgcgcaaatgggtacaaaattaccaagcaacgccgagagatgctacagtatttatcgggatatgaaaatcgctacattcccgtgactcaaatcgacgagcatatgcgcgccatttttccgggaatgagtcacaatacgatttatcgcaacattaaagattttgaacaacttggcttagtagaacaacaaacagagggtgaacaggcccacgttaaatatcaatgcgattttgaacatcgccaccatcatcactttatttgccgccagtgtggcaaagtgattgaattgaaaatgtgtccgttagatttttttagtcagcaaattccaaattgtcaaattgaaggtcatcagttcgaactctatggcctctgtgaagactgccaagcataatagaaagggagcgttaaaatggcatatcacacaccacccattattccaccagccgccattatttcgttaattatcgcaatgagtgcgaccaacattgtggcaaatacggttaaacctgttgaaaacaccaagacagagcagtcgtcatttgtttcaagtagtagtgcaaccacaggttcaaccagcagcatgaatacatcagaaccagaatctgagtctgaatcggaatcctcatcgacctctgaatcaaccgttaattcctcttctaaggctgtttcaagtcaggatcggacggatacggatgccaactcacaatcatctgatgatgagcagacaacaacaccacaaaatgatgagtcagctaacacgaccacggcaagcagtagctctgctaacacaagtagtagcgctaaagtggtttcaagtagtagcagtgccactgctacgcagtaataatttgttttacgcgcaataagggggacatttatcgtgttaacttttttagacattattaaccattatttcggttacttaaatattaatggtcgcgttaaaaatcgccttttttcagttatttgtttaattggtgatttttatcttctatataagagtgtgacctactttaaagctcaagcggttggacgaggtgtgattaacctcctcgtctttttggtgttattctattttgcagtgatgaacctgtatttctattatcggggcaaaaatgcggtcatcgatatttcaccgtatgttgaaaaagcgctgggtggtgatccaaacgcgccacatccactaaatggggtaaccgccaaaacgcaagtgatctcacaaattcaaccggccactggcttatttgaagaacaaaatctcttgcccgcgcaactgacaatggacgcggaacaaacccaacgtttaggatccttgattaacgaactgattgaatctggctatcttagcttgaattacgcaggcttaagtgataatgatatatatgaacaagcgcaacaattgcagcgaccaatttatgcgattgggaatcaagttgctttaccgttttatgaaatgaaacaagaagcagatcgttgggtgctctatggggggattaacgccattgccaaacaaccgttagcgcagattacgacggttggcttaaccccaatccaagacctagcccaagattatcaacttgcagtcgcccatacttggattacgggtggcccgaacaagatggccgggcgtagtggcgtgcttgaaggcaatgatccctatcaattagtggttcagattgcgtaccaagaacgaacaaagtagtcagtggaggaaaataggtggagattcataacgaattcttagatgtcaattattgttaccaatactacctactagaattagcggataacggcaattattacttaacagggtagattgtaaaatttttaatttatctttcgccggatttttaaactattccccgatttaaaattgaagtgcaacacttgataactagaccaattagactagcttaaaaggccatgaaggcctattcttattattaacgacaaaatcaacagataaggataggtgtcttcatgacccaaactaagaatatcatgcctaagcattaccaacaactccaatcttttgaacgcggtcaaattgagtccctgactcgattaggatttggcgttcgtcagattgccagccggcttcaccggagtcccagcaccatttctcgcgaattaaaacgcgggttaaccacccagattgattcccagaaacatcggtcatatcagggctactttgccgagcgcggggcggcttactatcgagaacagcgggccaagtgtcaccccaaaggtttactgcagcgggctgccgtgttcttcaagtccctgccgaaagctttaaaagctaagccacgagttttcagtgtcgacacgtatgtccactatttcaaagctcattacccgggctttccctgcccatcaacggctacggtctatcggtatatcgaggctggcaagctcccggagcttcacaactatgatttacccatgaagctacgtcgccgcgttaaacgcccgaatcaccgacatgcccgcctgaataaaaaacggcttggacagtccattgaagaccggcccgcagtggttcggaaacgtcaggagttgggccattgggaaggcgacttagtgaaagccaaacgggttgagtccgaaccagctttaatgacgttaaccgagcgagttagccggatggaaattatcgttaaattgcctgattaccgggcagagacttgccggcaagccctccaagatacgattgatgattacggtgcagaaaactttcggactatcacgtttgacaacggttcggaattcgctagtttaaatcaggttcaaggaacggaaatctactttgcccatccatattctccctgggaacggggcactaatgagaatgtgaatggtcaattaagagagttcttcccaaaggggtattcctttaaaaacctctcattagtggatctgcagttggttcaagacacgctgaatcaccgtccccgccgctgtttaagctatagttgtccagcggatgttatgccacaactggtttaactttctagaccaattataagaataggccattagtgttgcacttaacttgacaattgaggtttttaaactatttaaaatatacgcattttattcatccacaaatgttatagaattaaggcaatcaagtaagtgttttaatcctaataaaaatagtgggtacaataaaatgacgatttattatttaaaaccagaaaaaacagtcgataaaattatcaatacattgcacgctagtgttgctagcatgcaatattttgaaacgctagatatgatttgcgaaaaagttgagtttaatcttgatgaagccgcgctattacaacgaattaagcaactagccgatgattaacgcgcagatttggaaacccttcattcaatcggggtttcagaaaatgatatcgaccgtttaaaagctgcaggtttattattattcgttcaggataatgagattccacaaagctatgtgacgctcagtcggaaagcattagttggtttgcaagagattgcagtggcttatgctcaagagtctacacagctaacaatgaatattgattcaaaagaaattcaaagcttaaaagcagcttcagataagtttttcagaaagtatcaataagaaattgaaaaaagcccatcgacatttatgtcgatgggcttttttgtttgccgcaaagtagcgcttggctatgcttgaacgaactttttaacgggtcctaataggtctgggttgatttgtgcacgaatcaacgtgccatcttcttcatagctttgtttagtgatattggcacgatcactgaggtacgaaacagcttgcccttctgtgtatgggactaagaagtcgagcgttgggtattgttcaaagagttgtttgttaattaaggcaatcaatgcatcgattgctacttcgtcgcgagctgaataaacgatttggtttccgtctacttcaggatagcgcgtatctggtttcaaatcagctttattgtaagcctcgatgactgggatatctttaatgttgagtgattcaagggtttcttgtgtcgtttccatcatgtccaagtagtttggatctgagtaatcaaccacgtggattaaaagatcagcactcgctgcttcagctaaggttgatttaaaggcttgaattaagtgatgaggaagttttgtgacgaaaccaaccgtatcactcaacaggaatttctgttggttggggaggacgatttcgcggacactcgtgtctaaggtggcaaagagcatatccttttcaaaaacttgtttttcaggtgtatcggggttcaaccgttgtaaaattcgattcatagtcgttgatttacctgcattggtgtacccgacgagtgcgacaactggaatcgcatttttcgtccgttgacggcgttgtacgagttgttgttgatcgattttagcaagttcggctttgagcttcgtaatccgtttttcgatgagtcggcgatccaattcaagttgggtttcacccgccccacggttcgcagtacccccgccaccttgttgatccaacttgttttcagaaggatggaggcgtggtaattggtatttcgcttcggcgatggccacttggagttgcgcttcttttgttttggcacggctagcaaagatttcaagaattaattgcgtccgatcaagaatgcttattccgagttctttttctaaattccgaatctgtgaaggtgaaagttcatcgttaatcaagataatgtccgcatcttcagcgacggcgcgttctttaatttcttgaaccttccctttaccaaaataagtggcgtgattagcttggtcgatattttggcgaacgtcaccaacgacttctaagttatcggcacgggctagttcgcccagttcgcgcattgtatagtcaaaattaacttggcgttgactaacaccagtgattaaaacctttttaggttgcatataagtttcttccatgagatctcctttttgtgagagtgcgtcttcaaatggtcagccgttgaggattagcaatatctcgtaaatgagcggcaacgccgattgtttacgagatggcgctaaacgcagacggctatttgaagaaagcacgtttaagataagagtgcggcaccggcggttatctgctgaggattagcataggcagacgaaaaaccgatttgttggttatttggctgacgtagctaaccgagagcagatgcctggtggagcacgtttcaattgaaaaaaaggccatggcaaaaatattcttttgtcacagccctcagttaattaaatttaaaaagcgaatgccaacagaaatagccgcaaaatggccacatgattattcaattgtgattgcgattaaacaaacgttagttgacatgttgttgacgctcctttgatgtgaaatgggtggttacccaccttatccgttaagtgtaccatgaaagccattaaaaaccaaagttcgcctttagcgtgtacgccaataattaacactgttgtgggtgcccagcgtaattttatggtagaatgtaagcggttatcaaaatacataagagaatcgattgggggattgacgaatgaaaaatttagcattacttgatgttggtggcactacgattaaatatggtttatgggatggtgcggcgcaacaattgaccaaacaaggggctgttgccacaccaaagtcgttgaatgcgtattatgatgtgctgacgcagattgtggcggagtttaaggctagtgaccaagttgttggggtcgcaatgagtacgccgggtgcagtgaacaaggcgacgggtattattgaaggggccagtgcgctcccttatattcatcattttgaaattcaagatgaacttgaaacgcgctttgacttaccagtcgtaatggaaaatgatgcgaattgcgcggctttagccgaagtcggtagtggggctgctaaagggctaaaaaatgtgttgttcatggtaattggcactggcgttggtggttcagtgattgtcaacggacaagtccaacatggtcgccatttattcggtggtgagtttggctacatgatgatgaatgatggtcggattttaagtgaagtcgggaccgccgttcacatggctgaccgttataatcaagaggcacatactaactactcagggcgtgaagtttttgaattggctgatcaaggcgatttactcgcgcaaaaggaggcacaggtgctctatgataatctcgcacaagccatctataatttacaatatagttttgattcagaagcggttattttaggtggtggggtgtcgcaggccgatttcttggtgccaaatattgaaaaagctttacaggaaatactcaagcaagtcgatattgcgcctttcatgccaaccattcggacgtgtcagtatcataatgatgcgaacttgattggtgcaatggaagatttccgccgcacatatccgaatttagttgcaaattagactagtaaagaccgctttcaacatgtcataataaatattataaatgatattaggaggcggttaagatgcccacggaaaaacaagcattaaatcaaacgattggatttaccgcggcattagccactgtgatgggaacggtcatcggcgctggtgtgttctttaaagcggatcctgtgacgcatgcgaccggctccaccgggctgacaatgcttgcatggcttgtcggcggcttaatcacaatttgtgctggattgacagctgctgaattagcagctgcgattccagaaactggcgggatgatgcggtacatcgaccatacttatggtagtttagcggcatttttattaggttgggccgaaacaacagtctactttccagcgaacattgcggcgttgtcgattgtttttgcaacgcaatgcattaacttattcagttggtcagctcactggcagattccaattgcaatcatcgtcggactcagcttaacaatcttgaatttctttggttcccgggttgggggactattccaatccttcacaaccgtctttaaattaatcccgcttgcgattattattgtgttcgggttaattcatccaggcagcaacgccgttcatgtgtcattatttgacgtgacccggtcaaatggatcggggagtttcctgtcagcgctgggcagtggtgttctagcaaccctctttgcgtatgatggctggattcacgttgggaatattgcgggtgaattgaagcatccggaacgcgatttgccgcggtcaattttaattggtttaacaggaaccatggttgtctacctcttagtgagcgccgtcttcgttcttgtgttgccaatcaatcagattgccggcaatccgaatgcggcttcagaagtggctcgagtgctatttggtggtgtgggtggtaaaatcatcactatggggattttaatttccgtctatggcgggattaacggctacacgatgactgggatgcggattccttatgcgatggcgctcgagaatcggttaccattcagtcgacaactgcgctccctttctaaaacaggcgcgccggttgtcagtggtttagttcaaattagtatcgccatcgttatgatgtttatgggtggcttcaatacattgactgatatgttggttgttgtcatctggattttctatattctaacgtttatcgctgtgttcattctgcgcaaacgtgaaccagaattaaaccgtccgtatcgcacacttggttatccagtgattccagtcatcgccattcttggtgggattttcatcgtggtgaatacattattcacacagacgatgttaactttaatcggaatcggaattacattactcggattgcccttttattactatttaaaaaataaatatccagtcgtttaacacaaaaaacgaagttcgtgaattaactgaacttcgttttttttgtggtcaaaaaccaattgtagcaacggatagacgaaaaataaaatagttgcgcaaatgaattatcggcattaattgttgatttttggtagattgtaaaattaatccgaacgctgttcggacaaaaaagatcagcttcctttaaaatggtgtttaccacaaacccatcttttaggagctgatcttttgtctagtataacctattccgaggccgaaaggtttaaccttttttgttaccatcagttttttccaagagagagtagtgattaacctgcagctattagctaatgagatacttagtgttactcaggatgtttacgtggcctatgaagaaccctactagctgtgagtaggattaagctaagtaaaatataatatagcgcatcgtaattaaaaagccgtttaacagtcccttatgggatggttaaacggctttttgctatgctaaggcgtcattttctgtttcctgataacgttgcaagatgtagattgctaggataactagaattgcaccactcatttctacccaactaaagcgggcatggaagaagatgatacttagaataaatgtaattacaggttgtacggcatcaacgatactgattacggttgatggtgcaaagtttaaactgtgtaacaagcaaagatatgcgaatacagttccaatcaaaataacggctaaaattgcgataataccggaagcatttaaacgcggcggtgcttgccagaatggtcggtggatattgaagagtaaaccactgatgaacatgccccaacctaaaacgagaattggtgatttttcattaacgattggtcttggtagcacaacgtagaaagcagctgttacaccggataagattccccagattaatgaattaaaaggaattgttaaagtatggatattgcctttcgtaatagaaaggaaaacgccaattaaagcaattccgaatgagataatatcaattcgatttggccacttacgtaagaaagcgagggttccaataacgataaacagaggacttagatattgtaaaatagtcgccgctgctgcattccccgtttggatactcatgaagaaagtatattgattacccatgataccgaaaagggcgtaagcgattagccaagccgttaatcgttttgatttaaaaatggagaagatatcttgtttgaacttaattgccccgataagtaataaaattaaaccagcgccaagcgttctaacggataggaaccaagttgcagggatcttttgtccttgcgagatgaattccaaaatagtacctgaaacgccccagagtgcggacgccatagtcgcccaaaacatgcctttggcgatgttttgcggttgagttcgattgttcattgtgcgccatccttttttgaaaatttataactatactattataagctaaatggcgtatttatgctatttgcaaaacttttttcattattattccccacaaaataataaatatggcagtgataaagcgaactggtcaacaaaagctaattaagttatgatgaataaaaaagtgagggattcagatgcaatacattgcgttattacggggaattaatgtgggtggtaaacggccagttaaaatgagcgtgcttaaaactgcgtatgaagcggctgggttcaccaatgtgcaaacatacatcaatagtggcaacgtgttatttgaagccccagaaacaggcttaacaaccttagcggcaacttgtgatcagattatggtggagacctttggcttttctgtgaatatcgccgtggtcacagctgaccagttgattcaagctgttgcggacgcaccaacttggtggggcaatatgccagatgtgaaacataatttaatcgtggcgattgcgcctaaaacgggggcggaattgagtgtacatgtaggggcaattaagccagcgtatgaaaaagttgccgtgaatggtccgtttattttctggagtgcacccgtgaaaacattcggtcggacgcggtggtcgactgttgctaaaggggacctataccagtggctgacaattcggaatgccaacaccgctcgtaaattagtggcactcgcacaggcactacgggaagcatgaagtggttagactcgcatcttcattaatattcatatatacttatagtaataatcaataaagaaatgagggacgcgatgcgcttatccaatttgaaacagacgattatccagatggggttgatcttgattgctctcgaaattattgcgattgggattcaactcttctttgccccccatgaagtagcagccggtggggcaaccggtgtggggatcttattagaagaattgatggggtggaagatatcaacagtggtgtttgtgattaacatcggcatgctgatacttgcttacttcttacttgataagaaaaccacgttaagaattctctttggtagttttatgctaccagtttgtttagctttaacgccccaaatgatggtggtggaagacaaactattagcaattattatcgggagtgttgtttacgctgccggaattgccttgttatatcgaattgatgcctcgagtggtggctcaacagtgccaccgttaattttcaaaaaatatttcaatatcaaaccggcattgagtttgctggtagttgatttactagtctgctttgcgaatgtgttcgtctctggttttgagacgttcatgctggcaacttgttcatcaattctgacgttgattacgatgaactatattgagaccgggttgaaccggaaaaaggtcctctatgtcatgagtaacgaccaattacctgaaattaaagcccatttaatcgaagaatctgatgtgggcgtgacgatttttgatgttactgggggctattctaatgacaataagcagatgttgatgctcgttgttgaaaatcaagcctatcaacacattattaatcgaattcatgaagttgatcctttggcatttacgattgtggctaacgtagccgaggtacgcggcggtagtttataaatttaaaaagggtcgagacaattgtctcgacccttttgtgtgttattgatgattaaagtagcgatcagcttttaaattattgatggtgagcatgataatcaagctgatgatatagagtgttgaaatgaagagcatcacggtcatcaccgaataatgatcaagtaaccaaccgataatcacgctcgaaaatccaccgatacagcggccaacgttcataatcacgttattggcggttgcacggacttcggatgggtagaggcgactgacaatcgcgccatagcctgcaaacataccatttgagaagtagccgacaattgcaccgacgaacaataaagcacccatgctattggggaaggttaagatgtaaacgcctgctgctgaagcaatcaggaataagacaaaagcaaaccgtggaccaattcggtctagaatccaaccgaaagtcaacatgcctgctgacatcccggcaatcgtcgctaacatccaagttgatgaaccagccacactgaggtgcatttgttgttgcatgatggttggtaaccagttcattaaaccgaagtaaccagcgatttggacgattgccattatcatcagcgcaactgtttggtaagctagttcgcgtgttttaaaaagagcgctaatctgaccttttggttgatctgattcagaagtgaacgttgtactttcgactagatgatggcggataaaaaaagtaatgataacaggtaataggccgaatagaaatagtgcatgccaaccaaattgtggtaagacccacgctgctagaagtgccgcggcaatagcgccaagttgacctgcgacacccacgaaggatgaaacacgtccgagctgtttcttagggaaagattcggctaagaccgtcatgccaatcccatattcgccaccagcaccgatcccagctaagaagcgacagagataaatcatgggaagggtgtgggcaaatgacatagccgctgtcgcaaaagcaaagataaaaatggtgtaagtgaatgttttaatccgtccaacgcggtcggctaaaacgccaaaaaaaacgccacctaacaacattccaatattggtaatcgttgcgattaatcccgcctgtgttccactgagatgtaaatctgcaatgatggacgatagggtgaaagacaagaacataacgtccatgttttcgagaccgaagccggccgttgttgaggcgaccaccttagtctggtagcttgttaatcgatgttggctgtgtgccgtaatagttttcatattcagttttcctccaaaaaggacgctctctgtcgtcccttattttgcttggtgccaatcttagcacaggaaagtagtctgtgcaagggtgttatggaaaaagcgcaagcgtcctttgtgatataattgagtttataaaatggctcttcagcgatggagggcgtcatggaggctattgaatgactgataagaaaaaacactttacttttccgagcgcctacacagtaattctacttgttttactggcagtgatgatcttgacgtactttatgccagccggaaaatatgcgagtttacaatataacacgacccaggaaaacttcactgtggtcgcacccaatgggcatgaatcgacagcacctgggacacaagcaacactgaagaaataccacgttaatacggatttagcgaagtttaaggatgggtcggtgtataaaccagttgcgattccaaatacatatcaaaaactcaatcagcataaaccaaacttatttggcgcgattaaacaatttctgaatgcgcccattcaagggttatctgaaacaatcgatattatcacatttgtcttaattctaggtgggattgtgggcgttgtgaataagaccggtgcatttgcggccggaatggcggcgctatcgaaacgtttgaaaggtaaagaagcctggttaatcgtgattgtaacgagcttgattgccctaggcgggaccacctttggcttggctgaagaaacaattgctttctatccaattctagtgccaatctttatggcagctggctacgatgcgctagtcgcaattgcggcgatttatctaggcagttcaatcgggacaatggcttcaacggtgaacccattttccgtcgtgattgcttctaatacggctggcattagctttacagatggtatgggactaaggcttgtaatgctgattctaggcacattaatctgtattttctacacgattcggtatgctgaaaaagtaaaacaggatccaagccaatcgctcatttataatcaaaaagcagaattggaaaaacatttccttggaaatagtgatgtcaatgaagtaccacggtttgatttccggaagaaattgatgttaattatttttgcggccggttttgtcatcatggtcttcggcgtgaaggaatggggttggctatttaatgaaatttcctcgttattcttagcgattacgtttattttggcgtttatttccggattatcggaaaaagattttgttagtgaattcgttgcaggggcttccgacctgttaggtgtagcccttgtgattgctttagcacgcggcgtgacgattattatggaacaggcacaaattagtgatacgctattgtactggttaagtagtggcgtttcccatatgagtggtgttatcttctcaacggtgatgttcttcgttttcattctactaggattcttcattccgtcgagttccggtctagcggtgctatcaatgcccgtcatggcaccgttggctgatgtagtcggtgttaatcgtgacgttattattagtgcttataactggggacaaggcattatgtcgtttatcacgccaactggtttggtcttggcctcgctggcaatggtccatgtaacgtttgataagtggttaaaattcgtttggccattaatggcgattattggtctattagcaattattttactcggtgttagtgtctatctttaaaaaacggtcaaaaaaggtccgccacaatcgtggtggaccttttttcgtgattagtaaactttaaatttcgttactggccagtagcggagtttgacaacgccttgaatcccgttgaaggttttagaatcatcactgacaaagcctacttcttcataccggctatcctttgaaacagtccggttatcacccatgacgaagtagtggtgggcagggactgtggaacgaccaagcacgtcctttaaatcaaagtttggcttattagtctttgggttgagtgtgaagtagtttgacccggctaggaaggttgttggatcttttttatagtcatttaaataaggctcactgacttttttattattaatatagagttgatccttgttgaagcgaacagtttcaccgggcatgccgacaattcgtttaatgtagaattcacctggtgaatcaggggccttgacgataacgacgtcgccgcgtttcagtttcgtatggcgtagtgcaatgacccgatcatactgtgtaaagttgggttgcattgatggcccgaaaatttgttcattggcaatgacgaatttaagcagtaattgcgcaatgccgaccatcacggccgctaataaaatgatttgtatagtggatttccaaaattcttttgctttagctgacatatcgcacatccttagaattcaatagattcattgtactacaattaattggtagatgacaacaaaactgtacagttccttaactatttaaacgatcttttaaattaggggaacgccgcgttatttatcacgggaaacggttcgtggtatactgaaagggattattttaaacgacaggaaaagtgagtttaacgcatggcgaatttagtaattgtacgacatggcgagagtttagccaatcaattaaatacttatactggttggtctgatgtgccattaacggctgctgggcgcaaacaagcacagcatgtgggccgacaaattcaagcaaccggaattcaattcagtcatgtgcatacttcgttattgaagcgtgcaattttgacgagttacattattctggatgaaatagaccaattggccattccaatgacgaagagttggcgattaaatgagcgccattatggggcattgcgcgggttaaataaggaaaagacgcgggctatttttggtgcgcatcaagttgcccgctggcggcgtagttacacggcggtcccacctttattgacgactttttcgcaggcccgtcgttatcgactagttccaccgatgagtcggccacgcggggagagtcttgcacaggcaacgcaacggctattaccttattggcaagatcaagtagtgccaggattacttgcaggccaggaccaattgattgtagcgcatggttctactttgcgtgcgctcattaaggtgatcgaacagatttcagatcgcgatattgatggtgtggaagttgaaaatggtgaagcactgtattatcgattcgatgctcaaatggtagtcattgagaagggacgattagcggactaagcggatggacaacaaattgaaaagaggactgctgttggtagggctcatcctactaattattggcggcacgatttatcatgaacggcaaaaatatgccgtccaaactcaacaaacccaacaaaaaatgaaacaacttcagcaacaattacaggcaacaaaacttgagttagccattcaaaaggcaaaaagtcatgaagccgggattgatgatcgaaccatcaatcatttgagtgcgaaggaacaacaatttgtacagcagttgctacatgataacagttttagcgggaccattttaattgtgcggcggaatcatgtgttatttcaaggtggccggggctatgcaaattttgcgactaagcaactgaattctccacagacgacgtatcagattgcatcgattcaaaagtcattaacggctgcgttattgatgaaacaggtgcaagccgggaacatcgatttagcgacaccgttaagtcggtattacccgcagattaaagaggcggatcaaattacgctgaagatgatggttgatatgcgttctggactgactgaattatctgcaccagaaaaagaattatcagatcaagcgcggattcaatatgcgcttgatcatttggctgttaaagatattggtcagcataattattcgccagttaattaccttcttttggccgggattttagaacaagtcacccataagagttatcgagagttagttggaaatcagttgataataccgtttaaattaacatcgtttaattttatgccaaatgaaacgaccggccaacaagcgactgcttatggttatcaacaagacggctatggcacgccagttagtgaaccaagttacgtatatatgcgtgagttagggaccggaaatatgtatgccacaacgagtagcctctttcgaactgaacaggcgattgttcaaggaaaagtttttaaaaaatcgttattaaaaacgctccgctcatcgactactggtgaatatacgggtggtgtttataattacaaagattattttacaagccatggggtcgaatctggattcgaatctagcttgcagatgagtcaggatgggcgttcaggaattgtcttattatcgaatcaatataaggccaatccttcaatcggacttctaacgaatcaactttataagcagttaattacgctcaatcgttaaaaaagcagcttggcttaatgcctagctgctttttgtttggactgtaaaatgatgttgtgcaagtgtccaaaggccaaacccaattaaacagccaaaccagtttaagaggatatcactgagtgcgaaagtccctagataaaaggcgaattggagaatctcaatgcctagaatcgttaagagcgctatgatgttcgtttcaacaaatgaggctttcaaatggtacaaaccgcctaatgggatgaagtaaacgacattcagtgcggcttcgagcagtgttttgtgatccttttgaatgaaatcgaacgggttcaagctaactgcatgatagacgtttgctttagtgaataagacaatgaataataagagcagatagacgctgtagacgagataaccatagattggcgatagttgtcggcggtcccattgcacccagcccaaccaaaatgtaagggttaaaaatagaatcagaaaaagcgtcgttgctggaaaacgggccataacccgggttaagcgtggataactgttgagtgttggtaagacaatgtgccacacgaagtagcgacttatgaggtaggcgaccacaccggctaaaccatattcaagtatcttgcgcattacgattcctccagtgattatagtttggtttgggcgaggcgtttagtgaattcagccataaagtcaaaatgttgtgtgtcggctaacgtatcttctaatttatttagaagttcgttgagcgcttgttgttcgtcgggggttaggctaccgaataaagtctccgtaaattcattgcgaccatcgagggcttcttttaaaaccgctcgaccggccgctgtaatgaagacgtgggtgattcgccgatcatgatgatcgggccgccgattaatgtagtgtttagactctaatttgtgcaagcattcggttagggatgaaggccgaatatcgagactttcggcgagggctccctgcatttgtccgttttcgatattaaggcgttttagaatgcgaatttggctgactgagcgatgatcggatgaaaattgcatgccataataatggcgataatggtgaatcaccttattgaaagtttggaaaagctcgttagatagctcggtcatggggactccttaataaagtttaatttgagatgctaatacgggtataatacgtcatttcataaggtggagcaatattgctcaggttttatcaagattgttgtgaataattttacataataaccgcaaaaaaaacgatggttaaactgagtcagttctaaccatcgttttggggttgttattgagctgcctttaagaaatttaatgcagctgcataatctggttcgtctgtttgttcgataattaattcggtgtagctaattgtaccatctgcttccaaaataaagattgagcgttgaagcgtgttgttgcttggaacgtagagttgcattgctttcccgaaactgagtgcctcatcagaaaggagttgcatgttcttaacgccttctgcagcgcaccagttattttgttgttcgatggtgtttgttgaaattgtgtagaaatggacgtcttcgaattgatcgacggcttggttaaaatgctttgtttgaatgctgcaaacacgggtgtcaatgtctggcacgacgctaattaaagtccgtttaccgagcaattgcgcagaagtcaccgtttcgccagcggcatttttaaggtcaaattggggtaactgtgtgccgacggctggtggtgtgccgattgtatcgagtggttgatcatgtcttgtgatttgcatttgcataaacctcatttcataataaaagatgcttttattctaagctgattgtgctgagaacacaattaatcacgctcgaggagtatagaaaatactcaaaaaaatcttcttttgataaaaaagcataaccggttgttctgaaaccttttaacaatctaaaagcggttttagcataactgcttcgaagatctctaaattccgctaaagcatatctaacccacgtgtctaaattgttaagaagtggcaaagcatctttatatacttcaatgtctatataaggagaatcagtttcaccaacaattctgaatttagtaaacataacaaacatttctctatttaatccagatttactacgtcttccaaaatgaagtcccattaacttttcataagttctttgaatatcatcttcaaagcgattatttgcagtcggtttgtagttgctcaaatctttaagttgttcaaaagaaaatctaactgtctgatctcccttatcacgcatacgagaaataattgaaaaaaatagattcatttcaataggggtgaatttacgtaacggaatggtattaagttcaggatcatattttataagttcattgctcataatcacacctccacaactattatataaaatcaacgattgtttatcaacgatcaccattaaaagcctcgttgataaacagacaaaacctcgttgataaacagacaaaacctcgttgataaacagacaaaacctcgttgataaacttctgtgagccttggtagagtaaggcgcaagaggggtctaaaagaggtttaaaagaggtttataaaagaggtataaaagaggcaccgctgtacgagattaaaatctaaaacaaaaatacaaaggagtgagcccaaaaacgggctcacattaaactccactcgctacgcttcttgcgcctcactttgttcgttgcttaaaaggggtggcaagccacatttaatcgggcgctaacgccccgaacccccgtccaagctgagccagcttaaccgctttttcactcgccgttaggcaggaaagcaaagttttatagaaactttggctttcgccaattcagtgttaagactggtttagagctgtcaattccttatgctcccacgctacgctcgtccgctaccattgacagcaaacagttagtttttttgaatcttaacaagaatctaactgctatattcgtttttaagggccttatttctcgtttctagcgattttgagactgtttatatatatttataccaaagcaaaaataaaaagccctcagcaggcttttagagggctaaataacgaatccaggatgattaataatattttcttgtcttttttgcaaaatataagtgtataaggaatcatacaaattctttttaatctcgtcaggttcattgacagaagcttcaaacaattcttgaatatcaacttgccaaggatcagcaagcatttcaccaattggttttaatactttcttttcgtccatcttaatgactcctaacgtcaaaataatgctttcagtttaaattcacagatcttacagcaccgtcattcaaattttgttaccaagcttataaagattatctgcacaaagcaattaaaaaattttggcttaaaacagcgtaatctgcaacactttttaagtatctaaagcataacaaacttagttaagtgcaagtataaattgaattaaaaatacattcagtttaacaacagcaaaaactgattttatggttatcagcagaccgagtgaaacgaggtcaatgcgcacttacacaccacaattaaaattgctggtgtttgtgctaaatttcctgtatcagaagtcgccgttggcgacaactaaaaatccaaataaaactaaccaaaatcaatttgatctaacatactttcggtactggcttggtctaagcctaaataagctaaagtcatggcttcactggaatgatttaataagtgcatgaccaaaccaatattataattagattgtgtgtagacgcgataagccccggttttgcgcattgtgtgggtccctagataattaattcctaacagatcgccaaccttactcataattttgtagaactgtttttccgtgatatggcgctcagggtgttgaatggaaggaaagagccactcagaggctagtctatgatcaagtagccattgacggtacaataagagctctgtttgaactggtttaagatacaaggtattcggtttaccagtttttcgatcgtgaatgaacgcattttgtttaatagaaccgtccggattaaaaatatcggcctgttttaagcgcatgacatcactgactcgcagcagtgtcgctttgccaacttgaaaaactgtatagttacgccggccagctttaaagttgttgagtaaggtatcttgaacctctttgagaacgtttgaatctttgatgggtaagacaacttgttgcatagtttgagctccttaaaaaattgatttttagtacaaattaaagtacaatattaagtacaatgaaagggtggtaaatatgacattagcattaacacagagcgattttcgcgctaacttaaaaaaatatttagatcaagttaatgacgaagacgaaaccgtttatattgctcgttcaaatagtcgcgcagtggccatcgtttcacaagaaaaaatggattggctagaacgagcattaaaagctaaagaaggctcgttagaatatgcaattgcacgtgatcagttaattaaacgccatgttttacctgacgatgaaattgttgaatcagatgatgattattggggtcagtttaaataatgaaaaaactaagatttaaaccacgtgcaacctttaatgctgatctaaaacggttagccagtttagacaaatctattattgatgaagttcgagcagccattgacctgttgcttgagcagcaacaattaccaccagaatttgaagatcatgagcttaatcggcgaatgagcggttataatgaatttcatttacgagacaccccgaaaatcaaaacacccagcgaaactaacgatgtcctggtggtttatacgattgatacagatgaactagtcttaattggcattcgagtcggatcgcatgatcgtttatttcctggtcaaaatcgttctaaaaggtatcgaaaaaatgacgaatagaagaagtcatttttataatatgaaaataaataacccctaatatctacattatagatattaggggttattctttcaatatttttgagaggcgattttgtaaatgcgccatcaaaaatgcctcctcgaaaaaggttttccaagaccagtataacaccgttaaaaatctggcatagcctgttataccaaaataatattttggacaggctctgcgaggcaagtaatcgacaagcgattacagtagcgttttcccttccttctgggaaaactgttattttacagcgcctattatccggctcgtaaaacctccggcgggtcacgccgtgacagggcaatttaccgttgcatggtcgatttcatcgggagcatgtcatgcagaacgctacccgcgtcgggcaagctggtgtcagcttaaccacattaaaataatctgtaaacgtaagtgtataataaaaataaaatttataaggatggattaaacatggtagatttatcgtatgatcatttcggaatcactcgtaaaataacagaattggaagctgatatgcctaagaattggctcagcttcgtgaattctaataaaaacttgaactatatggagaagtttggtgtagtggctattttacaagcattacagtcttatggggggccaactaaagctgctcttgtcaaagaaaaggctgttgaatatccttattttacagatgcagatagagagaaaaagtctagtaatggtcaaagtcagttagattttagattgcagtggtctatgtctaatttaaagaaagccggattactttattcaccacagtggggagtatgggccttgacacagatgggagaagacgttgatataaataattttgatgtatgggacgatgtatactcaatatctactcctgtttggcaaaaaaataagctaaataatcaaaaaaagaaagatgaaatactatcatcttcaaatgtcaatattgccaatctggacgaagacattgtagaagaaacagatgattctgaattatggcgagatcaattattacagcgattgagtgaaatgaatccatataagtttgaagaattgattgtaaatcttatgcgaaaaataggcattaaaatggataccacttcaaaaacaggagatagtggcattgatggcataggttatttaagaacccctgagttgatgacatataaaattgtgttacaaactaagcgatttacaaaaggtccggttacaggaccagatatcagtaattttgctggtaccattagtggtcataatgcagacagagggatatttgtaacgacttctacctatacaaatgatgctgtcagtagatcgcgtcaaggagctaatttaattaccttagttgatggtgatgaattagtagatttattatttgaatatagagtgggcattagcgaaaaaacagtcgttgttatcaatgaaaaaatatttccaaaagattaatatacagtctgcactagtttgagataaaaagtgttagctttacccgttttttggtcgtggataaacgtattttgcttaatcgtaccatcggcgttaaagacatcaacctttttcagctgcatgacatcactgacccgtagtaaggtcgctttacccagttgaaaaatggtgtaattacgccgaccagctcgaaaactatccaacagcgtctcctggacacttgttaggacgttagaatctttgattggtaaaacaagttattgcaccataacctagtcacctcttttttaagcattagaatccaaccattataggcgttattttaagtataatctaaaaaacagcccctaacaaatcaacttggtttgttaggggctgttttaataggttttcacaggggcgatttgacatttatagaccctgaactattcttggacttcaaagtctggtaattcatcaatcaattcaagcgttcgcatacttactgttataacagtaagcaaaagattcaaaatatacttaggatcatcgctgaaatcattagaatcatctgtgatccctgacttattatctgttttcacttgatattgatcaataatccattcaatagcgggtcgaccgtttacaacataatcatatgctctttctggaatgtttttaatcgtgatactcttgttgtaaataatagtagtgtatcacaaattatggaaacacaatatacatatttttgtcaaaagttaggcgaaattttcagggagcagtagattaagtagtacaatgtagatatcgagttaaatggagggaattcaatgtataaagcggttgttttttttgatctagatggcacactatttgataatcaaaagaatgtttctgatgacaacattgcagcaattaatcagttacgagagaacaatattctccctgtaatttcaactggccgaaatatttttgaaattcaatatgtgattgacgctaccggtatcaattcattagtcagtgcgaacggtagttacgttcaatatcaagggaaaaagctaaaggctgagcaaattagtgatgaggtgattgaagagattttagcatttgccaaaaagcagggcgatgtgatttcattctataacaatgaagaatttgccttaacagctgaaaatgacttaactaaagttaactatcggctgttaagattgacgccgcacgttgagccggacttttacaagactcatgaagtcaatttcttgaacgtttttaattatgataaagataaactgtatcaggatgaattcaagggtgaattgtcattggttagaaataatcctcgctgtttagatacgatgaagtgggggatatcgaagcaaaccggcattcaagcactcttgaagaaagcgcaattaggggacattccgtcctatgctttcggagatcagctgaatgatttgcaaatgtttgctgaagtggattacccagtcgcaatgggtaatggtcacccagatgtgaaagccaaagcatcattcgtcactacttcaaatgtgaatggcggaattgtgaatgggctgaagcattacgggttaatcaaataacttacgatacgcaatcatttaagggcttcaccctgaaatcctcgttttggatttcagggtgaagcccttaaatgatgggattaaagcatcaattgtcccagttttccaaatggattgaattagtccatctgttttttaatgttagccaaggtcatttcactggtatcagtaaagttcacatctgcatccttcaaaattgtcttgtcaccaattccaatggaggtttccccagcggcgttaattgattcaactccagcggcagcatcttcgactccaatgcattgttctggtttcaaattgatcagttcggcacctttgaggtaaatttctggatctggtttgcctttgctcaaagtttttggatccacaatctttggaaaataatcagtcaattgtagcttcttcaaaacagtaggagcattttttgatgcagaagctaatgataacagataaccaccatctttaatttcatccaggaattctttaatccccggaagaatattagctggagtcattttgtcaaccaacttcaagtagtttgtatttttttccgttgcaagatcaaccttctgatcgtcagtatagtggtcttgtagattacctgcttttaaaatcatttcaagagaatccatccggctgattccctttaatccgtcttcaagttctttggaccatggggcacccaccttgtcagcaacttgatgccaagcttggctgtggaaaaccgaagtatccgtaattacaccgtcgagatcgaagacaaaacctttaatatctgaaaactttgccattgtatttcactcctaatcttatttgtaagtaataacagttggcttgttcttggataatgaataacccttgtcaccaaccttgatgtgactgctcgaatcggcagtcacattgattttatgatgaccgatttcaaaattgtacgtgatgccttgatacgtttgcttaaatgatagcttactccaagtggttggaaggtgcgggttgatggaaacctcgtcggtgtcaaaccgaaccccgccgtaacacttggtttcaatttcaagcgtagcacccatgacgccaaggtgaataccttcagcagtggtcccaccttggatatcatagtaatcggagaacaaggcggttgagaacaattgccaggatcgatccatattgccatccatttcatccagaactgaataaacaattcgtgaaagggtggatccgtgagtcgttcgatcaaggtaaaatcttaaattggtggtaaagtagttggcgggcaacttgtaaccaagccgggtaatgacgttttgaacttcatcaaatggtaattcgtaataagccatcaaagtgtcggcttgtttggcaacttgataggaatcaggtgaattaccttcaccctttaacagtcgatcaattcgcgatatatcaccgtatttcttccggtaagaatcaaagttgagcttggaaagattgaagtaaccggaaaattgaccaatgatgccttcttcgttgatatcgagacgaagtttgtgggcaatatcactcatttgatcaagtaaactattgtctgtttgggctttttcattggcagatttgattatcttaggatcttcatgactcatcagctctgcgactttatcaaataaccaagaaaccatgatattggtataagcattattagtgagtccgtgatcatcagagtttggatattcttcgtggaattcatctggtcccatgacgtgatgaatatcgtaacgatcatcttttttatcgtagcttgccatgctgacccagaacttgcaaattgacaataacatttctaatccgtagttcctcatgaattcggtatcacctgttagatgaacataattaatgacatcgtaggcaactgacagtgaaacgtgacgttgcaagcgactgttatccggatcccattcaccactaaccgggttcaagtgaacaaattgagattgttcatccccatacatccctgactgccaaggatacattgccccttgcttgtcttccgaggcggcgtatttgcgcgcttcaccgattcgattatagcgatataacaagcactgtttagcgattgctgggtaatgaatagcataaaacggtagatcaaaggtgacatcccagaagatgtggcctcgataagcttcaccgtgtaagccacgagcgccgactgaggaatctaattgaccagaagccaaggcggcacttgtcacaagcatatggtagatgttaacccgcgtcagtttttggctggtcatatcattatcaatttggatatctgaattctgccaaacgttgctccagaacttttgactgtcggcgagggtgtcattgaacgaagaagcgttcagttccttttgggcgggttgttccaagttggcatcctgagtttggctggtaaatactgtgacacatttttcaaatacatacgatttctcaggttctacttggatatccaatttttgctggattgatttatcttcagtttcagctgaaattaacttggtggtatcgatatctttgctagaaagcttagaattaatcacaaagttaacgtgggacgtcttggtttgaccggttaacgaaatctggttatcgcgggcaaccatgccaatgacgtcgatatggtgttgatcgaaaccctgatagcgctcaacattgccattaataacagtcccgtcaatttttgaatagagttgaatgctcccagaaaagttgattggttttaattcatacttgatggaataacgatgccaatttgtcatattggcaactttggtagcccgaacttgcaaaatgtggccagttgataattgaatatgcaaggtggttgttaaaacaccggttcgcaaatttaggcttcgataaatatcttgaatatcttcttttttaatttcaaacggttgttgatgatccaccccaaaactgatgtattgagcattggggaggtttactagatcttcgttgacaacatcccgaccgttaattttggttgtgagttgattgtagacaccagcaacgtacatcccagggtaattatcctggttggcgttcgcttcgacatacgcaccccgcaggccaaagtagccgttaccgattgtcagcatggcctcttgcccatagttacgcttgccgctgtactcaccataataatcaaggtgccacttcaaatattcctgtttttctgccactgctttttccaaaccaacatcttgaaccttatgcaggttaacgaccggaatattcatcatgttggcaattgctaggccaatatcgatcttttgatgattaataccgatgatcgtgtcagagaattcatagttcaatgaatcctcaataattgctgcatcaattggcaccccagtgagggcagccttaatgttctcaagattatcgccaattgaaaatttggggttgtaggtgatcataaacttcctaaaagggggcttattggaattctctgaataattgatttccatgaccccatcacgagcccttatcgcaaacgttctcataacaaaacctcttctcaagtatttccatttgtgaaaatcatttataagttaattctagttcaaatatccggtaatcgcaattaattggggtttgaaagtaatttgagcaagccggctgttttcatttttgctgattttcgagtagatctttgatttctgaaagcaggacttccttgcgatcaacactggcggttttgggctgttttttaactatccgattaatgatttatttgagctgtggaaggtaaacgcggttctgaatgtctcttaaaacctgtctcaaatattgacttcaatccagatcttttttgtccgaacgctgttcggacaaaaaagatcagcttcctttaaaattataaggcaaaaattccgccctcacgcttattatcggcttgcattgcaatgacaacatacttcaacgttgtaatgatcattaatgtccaaaaaatcaacgagatcgatccaatcacgtaatcgggagaaatatttcccattttaccggcgtcaccaatcaatgcattcataacatacaatggtgaagtgccaatatcaccgtacacaattcctaaagtaacaagtgcccccgcaaaagaaacacgttctagttgcttattcataattacttgcctccaaagtcatttcttgaaatatggcactgaaaaatagtaagcctaaacactaagaaaagcaactatgccatatacatcataatgaaatcactttaaagaagttcataatttacgatatactgattgaaaccataaattatgggtcttctattcttaactatctagttgaaccatctgataaccgactccaatgtgtgttttaatatactgattctgagtattaacttcaatcttttttcgcaaagttgcaatggtcactcgaagagaagatgtatcttcaaccgattctgtcccccagacctctttcaacagatagcggtgtgtcaacacgcgggaagtgttttcagcaagaataatcaaaaccttatattcgattggtgttaaatggatttcattttggtttactttgaccgtttgtgaatcaaagttgatagtcaattctccattacaataattattaatattggtttttccgttgttatatattatgttagtccttctcaaggaaacacgaattctagccagtaattcatcaatagaaaagggttttgttaaataatcatcagcacccaaatctagagcctgcactttgtcggcgtcctcatcacgtgctgaaataacaataataggtatattattgttggcagctcgtatttgcttaataatgtccatcccatccatatcgggtaacattagatcaagtaaaagtacatctggttgaaaaattggaataaattggagcgttttattgccatttctagctatgccatacttataatctgcggatcttaatgtcatttgtattaatcgagctacttctggatcatcttcgacaatcaaaattctatttttcattttttttgctccaaataggtaaagtaaagtaaaaacatacgccgttatttaaatttttagcccaaatattaccatcataagcttcaataatagatttacacaatgataagccaattccaagccctctttgagcccttaagggttgcttttgtttgccagtgtaaaacagtccaaataggtgagccagatcaccattagttaattttggtccgttatttgaaatctcaaattggacttgattggtattcttttgaaaaattctaatcgaaattttggttttttccggtgtgtgttgaatagcattgttaactatattaataatgacttgggtaattaagtgtgcgtcagccatgaccattaataatggatcagacaagttaacggtaatcttatgatcttcaaatcctgggctaagatgttgcaaagattcttgaataatatcatcaattaactctggagaatgacgtacttgaagactactctctaaacgagtcattgccaatagattctccactagactaattaaccatgaagagtcattaaatattgattcatataatgtatacttctcaacatcactaagcttatttccttctcgtttcaatatatctgcactaccagaaatatttgttaacggtgttcgtaaatcatgggagattcctcgtagcaagttagccctgagtttttcctgatgcgatttaatttcagcttttcttttttcatttaggattctcatccttgataaggcttgaccacattcatccaatatcgaaataattaaattacgatcaaatatttccaaagatcgttttgaatttattgctaagcctataaccgcaacaactgatgaaggggaatttccaaaaataggtaaatataaacactttgcttgtggtaaagtattagtagttaatccagcttcttgaccattcttgaatgcccaggttgcaatggctttctcgttatcactggaaaactcataaaaagagctctggctttggtttaacagataaattttaggttgcagtaacttagaatcctggcattcataaaagaccattgtagcactataaattttttgtagttgttgaacagtcgtgtcaataatatcggttgataatttggcttgttgcaatttacgaatagtttccaacagcacctctgtttggtagacacggttagagttatattgaacttggtgcttcaattttagtgtccaataattactgattattgaaactagtagcattaaaaaaaatgtcaacaagtaaactggactactactaagagaaaaatagggtttggtaaaaaataaattgaaactaattactgctaaaaaagctgataagaatccatatacttgatcttttaggttaattgcgcagagcatgatccctaacatataaaccaaaacgacatttaccaatggtacttgtgcaaatattaatagttctccaaccactgtgcttcccaaaataatacttgaaatcattagcatatttttagccatgcgcttagagccagacttactaagtgaacctttaaaatgggttaaaaatgtaccatttaaatgttggacttgattcaaattagttttagcactattaattacatactcatcaacttctggtaacagatatcctatttgatacacaagtgtagatcgtgtttgccatatttttttataaggactagccccaagtacaattttggttacgctgctttctttggcatactctgtaatttgcagagctgggttctcaccctgcaatttaataacctttgcacctagttgatgggcaaggctaatgttattatttaagttttcctcccatttattaaactgattgttcttaacataaaccgcaatgaagtcactattaaaagcttgagccatttgtgcagcagaacgaatgacacgttcattactcttagatccggataaacagactagtagccgatcagtacctacctttgagttggtagccaatcttaaagtcattttcctcaatgcaagttctcttaacgtagtaagattttcagatttaaaaaaattagctaatgcttgccttatatgatttctagcatatatttttccaattttaagtctattgatcagatcattgggttcgatatcaattaacttgacctgatttgccatatcaaatatataatctggtactcgttcttgaatatcaacgtttaattgttcaaaaattatatcgtgcaggctttctagatgttgaacatttagcgttgtataaacattgataccagcagtaagtaattcctgaatgtcttgataacgtttcaaatggcgactttttttcgtatttgtatgtgctaactcatcaactaaaattgtctgtggatgtcgttccagtgcaccatcgagattgaattcttgaagatacattcccttataggattctttttttacagggattgattctaaccccctagcaagattgcgtgtatctgccctgccatgatcctcaaggtatccaataatgacatcctggccctcctgcttcaagtcctgtgcttctgctagcatagaataagttttgccaacaccagcggcataaccaaagaaaatctttaatttccccctgcctgaagtttcaagatttgcatcttttaagtacctacttgcacgttcattttgattcatctagttatccctccaaatagaatacaagaatatccttggtaagtatactatcgttctaactaaatttacccaaaaataaagtcttgtcttttataatcttcaaataaagatctttataggctctattacatatgacacaaaacccctaaatgattatcacatatggtaatcatttaggggcttaacccgcgacttatctcagctaagcttcaaaagttattttgatagtttatccaaggccagattagtttctagcacgttaacccgaggttcaccaagaattcccagagtgcgagttttggtattttggtcaatcactcgttgaattttttgaacactgacatgccgagccttagcaattctcttaacctgatatttagcagcagttggtgatatttccggatctaagccacttcctgaattagttactaggtcaatgggaacatgtcgataagtggcattaggattcaatctttttattgtcttttctttatcaataatctccttttgataacttttatcgttagggctcatttgtgaggccacagagtacataatatttttattgtttttttgtccagttatatcgccaacagtaatatccatctgtctaccccacaggtattttttgcttgtgaatggttgtgcaattagtgctgatccccttactgtttgatcagatctaactaaactgccatttgcttgtgaggtaaaaaaggtttgcccaattgcactaacaattaaggtatagataccacaaataatcgttatgacaattactgccaaaattgacttacctaatgtcttaactaccattattgtctttctcccttctcatagaatctgtagtatgagtgcaatgatcaagtcgatcaacttaattccaatgaatggaacaactatcccaccaagcccataaactagcaaattatgccgcagtaactgactagctggaacttctcggtaacgtactcccttgagtgccaggggaattaaggcgacaataattagtgcgttaaaaatcaatgctgacaggattgcacttgttggactatacaaatgcataatgttaagcacatttaacttgggatataatcctacaaacatagccggaatgatagcaaaatacttagcaatgtcgtttgcaattgaaaaagtggttaagcttcctcgagtcattaataattgtttaccaatttggacaattttaattaatttagttggtgaagaatctagatcaaccatattaccagcctcttttgcagcctgtgtacccgtgttcatagctacagcaacgtcggcctgagccaaggcaggagcgtcattagttccatcgccagtcatggcaactaaatgtcccttattttgatattcacgaatggttttcattttactttctggagtagcctgagatagaaaactatcaaccccagcttcagcagcaatggcagcagcggttactggattatcgccagtaatcatgattgtctttatgcccatcttccttagatcagcaaatttttccttaacgccgggttttatgatatctttcaagtagataacaccaagaataacaccattcttgcatactactaaaggtgtccctccctgttcagcaattctcttaactgctatttggcattcttcgctgtatttatttttttttgtcaggacatattgtttgatattctccgaagcacctttacgaatttcatctccagcaaaattaacaccactcattttagtttgtgctgaaaatggaataaacttagcctgatttgcttctaagttctgttctctaaggctatacttttcttttgctaatacaacaattgatcttccttccggcgtctcatcagctaaggatgaaagctgtgccgcaattgctaattctttttctgaatggccatcgactggaataaatgctgaggcacgtcgattgcctaatgttattgtcccagttttgtccaggagtaatacatcggtatcgccagcagcctcaatggcccgaccactcattgctaaaacattagcttgattcaatctactcatgccagcaataccgatagctgaaagaagtgctccaatggttgtcggggctaaacaaaccagtaatgcaattaaccatacaatagacattggatttctcatatcaagtatctgagatgataactgagaatacgtgtataataccgccactaccaacacaaatatgatagacaatgcaactaaaaaaatttctagtgcaatttcattaggcgtttttttacggttagcaccttctaccattccaatcattttgtccaaaaaactagcaccttgttcttgtgttaccttgatgaccaaatgatctgataaaacagtagtaccaccggtaacagcagagcgatctccgccagcttctcgtattaccggcgcagattcaccggtaattgcactctcgtcaacagaagcagctccttcgacaacttcaccatctgctgcaatggtttccccagcttcagcaaggaatagatcacctttatttaagttttctccactaactttttcaatatttgataaatcgccaactttatttaacctttttgccattactgcacgttttgattttttcaactctgccgcttgagctttaccgcgcccttcagcgacagcctctgaaaagtttgcaaacaggcaagtaatccaaagaattacagctactgtaaagataaaaccactacttacaattctgtctgagatgccaaaaagcgataaaataaataagatagttgttgcaattgctgatacataaactagaaacatcactggatttttaatttgtaggttaggctttaacttaagaaaagtttctttaagtgccgctcctaacatttttcggttaaacatttgatttttctctattttttcattcatagtcagacccaccttactaattttagaaacgcataatgtaaaatcatattaatgtgtcaaaaagtccgctattggtcctaatgatagtgctggaaagaaactaagcacgccaatgattaatacaacgattattaacataaaaacaaaggttggacttgtagttgataatgttcccgaactactagcaacaattttatgctgtcccattttaccagcaatcgccattatagcgataataggaagaaaacgagaaatgatcatcgcaacagctaataaaacattgaaaataatggtattaccattgaaccctccaaagctggaaccattatttgcccctgctgatgaaaaagcatataaaaattcagagaatccatgtgctccactattgctaagactagttaaagtactctttaacattgctggaatagcactgcaagttaaaattgcaattggcgttgataggcaagcgataacagccatacgcatttcgtaaggcccaatttttttacctaaatattctggtgtacgtcctaccattagcccagcaataaaaactgttaggatgataaatccaagcatgccgtacaatccagatcctacaccaccaaaaacaacctcgcctaattgcattaaagccatgggcattaatccgcccagagaactaaaactatctaatgttgcattcactgcgcctgtagatgttgcagtagtaacaatactccaaacagctgatccaggaataccaattctagtttctttgccttccatagccaaattaccaatatgagctaaagtgatcccatgttgttcaacaattccttcaaatattaacgcaactacaaacataattgccatagctgagaagattgcccaaccttccttacgccgctttaaagattcaccaaagctaaaacatagcgccatgggcagaagaagcattgccgttgtttcaataaagtttgtaaaaggtgttggattttcatatggatgggcagagttagcacctaagacccccccaccattagtccccaataacttaattgatacctgggaagcttgtgggaataacggtaaggtttctttagttataatttttgccccatcgattttgtgatttttaatcctaactgtattttttttgacgttaatttcagccccatgaatcgcctggttatgtttatcaacggcaacaggttgtaccaaggtagcagttttataaccaccagttgtttgaggaacaccacctgccatgagcataatagacataaacaaactaagcgggattaaaagatatagaaagatcctggtcaagtctcgccaaaagtttccaattgcttttgcttctgtacgttggatacctctaattaatgcaaaaagaaccgcgattccaacagccgcagaggcaaagttttgaacagttaaaccaatcgtctgagaaaaattagaaagagccatttccccagaatatgattgccaattagtgttggttacgaaactaacagcagtattaaacgctaatgaccaagaaagccccgaaaaatgttctggattcccaggtaaataattttggaatttcaaaatactaaacaaaactaaaaaactaactaaagaaaacattaaaatacttagtaagtaagttttccaactcatctcgcgattagacacacgaaaaaatttatatattttgttttcaattggtcggataattctgctcataaaattgttctgatcattaataatatggctgatatacttgcctaatggaatggctaataataatggaacaatgatatatggtaaatattgagcccatgttggcatactatgattctcctttcactagaacataaattagataagctaataaaaagattgttaagatcgttcctaagaccaaaaccatttgtctcacttccaattaattttttaatttaatcaagggtgctccatcacgttaatgcgttgtttccaaaattttctaacactaataggaactttgtctgagaatccgtagtcaaatttaagatgctgagcagtatcgaaaaaataaaaaattgtaacatctgctatgaaaaggtctcctgaagtactttgaatgtagccccccatcttttttttaatatcattatcaattaaacaaattactttttctcgactatactggtccgaataatctttgtaataatagttatcaatcattttgaacatctccaaaacatatttaaatcaaccaaagatatagtatatgaaaaggtgttaaaatggtgttaatatttaaaatctcatgttaacattttgttaaataaaacaacattgagcgaggatgggcaagagtttcttttgtcccatctttttttgtgctttgataataaattgagcagcatcataaagctaatcccgttcgacttcacactctatgctataatagtttagttaatacttaaaggagattacttatggacggcattgtacccttatataaagaacgcggcatgacgagtaacgattgtgtgtttaaagtgcgccgcattttacacatgaagaaagtgggccattctggcacgttggatcccaacgtcgatggggtgttaccaatctgtatcggtcaagcaacgaaggttgttgatcaattggtgcattctggtaaagtctacacgggtgaaatcacccttggcttatcaacaacgactgaagacttagatggtgaagtcgttgaagaggcgcgcttaacagaacctttttcaactgagagaatcaaagagaccctcgctagttttctgggcgattcaattcagattccccccatgttttcagcggtgaaagtcaatgggcggcgtttatacgactatgcgcgcactggtgatccagtcgaacggccacaacgttcaatcacgattacgcagtttgatttggatggtgaaccacaatttgacgcagaatctgggcgccaaacattccggttcattgtcggttgctcaaaggggacttatatccgcacattagctgttgatttcggtcgtaaactcggtttacccgcagtgatgtccgatttgacacgtcttaagagtggcggcattcaaattggtaactgtatcacgttggaacaattggcgcaaaaagctgaagcgggcgaactggcagacgttttattgccaattgaccatgtatttgaagattacaagaagattgctttagacgacgatcaatgggccaagcttttaaacggtgtgttcttgacattgccagaacaaaccgatgagattgtggcgttgacctatcaagggcatatcaaggcgctctatcaagttgaaaaagcagcgcaacatctttatcgcccttataaaatgtatttacaaaatcaagggactcattaaaaaaaactaggtgaaaaatatgcgtgtcattgaattaattcatccatattcaaaagaacaagtgccagctgaccaagtggtcttggcgcttggcttttttgatggcgtacatcgaggccatcaagctgtaattcggaaagcaaaacaaattgcagttcaaaaaggtttactattagctgtgatgacgtttgatatccatcctgccattgtttatcgcaatgccgatcgggagtcattccgttatttatcaacggttgagcgcaagcaagaattgatggcggagttaggcgttgatgttttctacatcgtgcactttaatgaagcatttgcacaactagccccacaaacatttgtcgatcaatacttagtcgctttacatgcggatacagtggtggctggctttgattacacttatggtaaaaaagagattgcgaatatgacgacattgtcagactatgccaaagggcgctttgccattgtgacagttgcagaacatgaccataatggtgtcaaaatcggctcgacattagtacgagaggatttagatgctggtaagattgcggaagctaatgaattactcggttatgtttaccaaacgaccggtgaagtagtgcatggtgaagcacgcgggcgagaattagggtttccaactgctaacatcgaatcgcaacgaccagaacgattaccaggaattgggatttatgcggtccgctttttagtgcgcggtcaatggtatattggcatggcttcaattggtcggaatgtgacgttccacagcaataacccggtaacggtggagattaacttattagatttcaatggcgatatttacggtgaacaagtgaaagtggattggtatcactacttacgcggcgaagtgaagtttgactccgcggaagccttgattgaccaactccaccaagacgaagccgatacccgaacttattttgagaaattagaggcacaacattaatggcaggcgcttatattcacatcccattttgcgagcatatttgttactactgcgatttcaataaggttttcattgaaggtcaaccggtcgatgattatgtcgatatgttgattcgcgagtttcaattagtgatggcagaatacccagacgaaccaattgatacgatctatgtcggtggggggacaccaactactttatcaccagcacaactccaacgtttaaccgatgggattcatcaatacttaccttatgagggtggtgagtttacgtttgaagccaatcctaatgacttacaagatactgaaaaattgcaagttctgaaggacaacggcgtcaaccggttaagtattggcgtgcagtcgtttaatgatcagattttaaaacagatcgggcggattcaccgaagtgcggatgtttatcgggcaatcgataacgcgcgcaaggtcggcttcgaaaatatgagtatcgatttgattttccgcttaccacaacaaagtgaagcggatttcatggatagtttgaataaggcaattgaactcgacttaccgcattattcgacgtactcattgattctcgaacgcaaaacaatcttctataacttgatgcgccaaggcaagttgcatttaccatcgcaagatgttgaagcacatatgtatcaagccgcgattgatagtttcaagcgggctggcttagatcaatatgaaatcagtaattttgccaagccaggctttcaatctgcgcataatctaacttactggcgcaatgaaaagtattttggctttggtgccggtgcttacggctatttaggtaaggatcgttaccataacttcggcccaatccaacaatacttagaacccttaaaagaaaataaggtgccagtcattgaacgccatgttctgccactgaccgaacaaatggaggaagaactcttcctcgggttacggacgatgcaaggcgtatccatcagtcattttcaagataaattcaattatccattacaaaatgtttacggcgaaacagttgccacccaaattgtaaagggctacctcaaacaagaaggcgattggttaagactaactgaatcaggtaagttcttaggcaatgaagtcttccaagagtttctgctagatagttattgagtgcgttcaaaccgggggatattctgagcattcgccttgtgtcgctaggcacaggaatatggtttgaaaagcacgttataaatattccacttcataaagcgagtctcttccatctaagaagcggctcgttttttattttgtcctttggtccagtaaggccctccgtctaaggaccgattttcagtaaatccgtaaaaaagccggtacgtttcttgactttatttgacgttcttgctatattaataattgtaattagcactcatgatattcaagtgctaaaaagaggtgatgacatgctgaccgaaaggcaattaatgattttgaaagaaattattcgtctttttacagagagtggtcagccagtgggttctaagaagttaatggcagaattgccggtacacgttagttctgcaacaattcgtaatgatatggctgatttggaaagtgtcggtttaattgagaagacgcattcgtcatctggacgggtaccgtcgatgcaaggctatcgctactatctagaccatctcatgcaaccagcaaccctcaatccggttgatgtggcaacggtccaacaatcatttggacagcactatcataagattgatgaaatcgtctcacaatcggctaatatcttatcgaacctaacgagctatacagcaatcgcgttaggaccggaagtggctgagattcggttaactggttttcgtctagtaccgttgagtaatcaccaagtgatggcgattatcgtgacgagtgcagggacagttgataatcaggtatttaccattccacaagcgatttcgggtgatgaactcgaaaaagccattcgaatcattaatgatcacctaattggcttaccgttaaccgtggttagtcagaagttaaagacggatgtaccggcgctattagcccagtacatggcttctccgaccggctttttagacatcttcgacgatgttttgaaaaaggcgagtcaagagcgcttatttgttggcggtcagatgaacttgttgaatttttcagagttctccgatgtcacccagctgaagtcgttgtataacatgattaatcgttcagatgatttagccaagttgctagatttgtcccctggaggcgccaatagccaagttcaggttcgcctgggcaccgagatggccaacgatctgttgaaacattatagtctaatgactgttaattatgacgttggtgaacacggacagggagtcattgcactactgggccccactagcatgccctattcgcggatgattgggttactcgatttattccgtgaagagttagcgaagaaattaattgattattatgcgaatttcgatgatgatcaatcttaaaaggagcgtgtttgtttgaccaagcaagaaaaggctgagaaacaagaaaagccagcagcagaaatgccagaaacagaaacacctaaagaagaaacgccatttgaacctgaattagaagcagatgaagtgatcgaagatgctgcacctgacgaagatgcagctaagccagatttagcggctcaacttgctgaactccaaaagaaatatgatgatttagaagatagtttcttacggtcacaagctgaaattaaaaacattcaaacccgtcatcaaaaagaacaagctagcttgttaaaatatgatgggcaatcacttgcaaaagatgtcttacccgttttggataatctagaacgtgcgttggcaactgaagcaactgatgatagtgctgagagtcttaaaaagggtgttcaaatgacatacgatcatatgaaacatgctttagaagatcatggcgttaaggaaattgaggcgcaaggacaagcctttgatccgaccattcatcaggccgtgcaaacggtcgctgttgatggtgatcaaaaagcggatactgttgtacaagtcttccaaaaaggctactacttgaaggaccgcgtcttaagaccagcaatggtcgttgttgcacaataaattaaactaaaaatctaaaaaaagagggtattttttatgagtaaagtaatcggtattgacttagggacaaccaactcagctgttgccgtattagaaggcggacaaccaaaaattatcacaaatccagaaggcgcacggacaacaccatctgttgtgtcatttaaaaacggcgaaatccaagttggtgaagtggcaaaacgccaagcaatcactaaccctgatacaatcgcatcaatcaaacgtcacatcggcgaagcaggttacaaagtaactgttggcgacaaatcatatacaccacaagaagtttcagcaatgatcttacaatacatcaagaaattcgctgaagattatcttggtgaagaagtcacagaagctgttatcacagtacctgcttacttcaatgattcacaacgccaagccactaaagatgctggtaagattgccggcttagatgttaaacggattatcaacgaaccaacagcttcagcattagcttacggtttggacaagacagaaacagacgaaaaagtcttagtttatgaccttggtggtgggactttcgacgtttctgttcttgaattaggcgacggtgtcttccaagtattatcaacaaacggtgatacacatttaggtggggatgactttgatgaagccatcatgaactggttagttgaaaacttcaaatcagacaacggtatcgacttgtcaaaagacaagatggctatgcaacgtctaaaagatgctgctgaaaaagctaaaaaagatttatctggtgtgacaagcacccaaatcagcttgccatttatctcagccggcgaaaacggtcctttacatttggaaatgactttatcacgtgctgaattcgataagttaacatcagacttagttgaccggacaaaagcacctgttatgaacgctttgaaagatgctggtctagaatcaggcgacatcgacaaagtcatcttaaacggtggttcaacacgaattcctgctgttcaagaagctgttaagaactggacaggcaaggaacctgatcactcaatcaaccctgacgaagctgttgctcttggtgctgctgttcaaggtggcgttatctcaggtgacgttaaagacgttgttttacttgatgtgacaccattatcattagggattgaaacaatgggcggtgtcttcacgaagttaatcgaccggaacacaacaattcctacaagcaaagcccaaacattctcaacagctgccgacaaccaacctgccgtagacatccatgtcttacaaggtgaacgtccaatggctgctgataacaagactttaggccgtttccaattaacagatattcctgctgcacctcgtggtgtgccacaaatcgaagttaaattcgatattgataagaacgggattgttaatgtttctgctaaagaccttggcacaaacaaagaacaaaaaatcactatcaagagtaactctggtttatcagacgaagaaatcgatcggatgatgaaagaagctcaagaaaatgaagaagccgacaacaaacgtaaagaagaagttgatttgaagaacgatgttgatcaattaatcttccaaacagataagactttgaaagaacttgaaggtaaagtttctgacgaagaattacaaaaggctaaagatgctaaagaagaattagtcaaagcacaacaagaaaacaactttgaagacatgaagacaaaacgcgatgcgttgagtgaaatcgttcaagaattaacagttaagttatatcaacaagcgcaagaagcacaacaagctgctggtgctgaaggtaatgcaactgacggtaagtctgacgatggtactgttgacggcgacttcgaagaagttaaagacgacaaataataatgcgttttaaaaaaagccaaaacctagtatggtctagggccttggctttttttaatcagtcaattatgctatccttgataagatagatttaacgcgtaagtatatgaatggaggcccacaatggctgataaaagagattactatgacgtcttagggataagtaaagacgcctcagatgatgagattaaaaaggcctatcgtaaactttcaaagaagtaccatccagatattaacaaagccccagatgcagaagccaagttcaaggaagtcacagaagcgtatgaagcattaagtgacccacaaaaacgggcagcttatgaccaatacggtcatgctggcatgaacggtggtttcggcggcggcgcaggccaaggcttcggtggcggctttggtggtgctgaaggcttcggcggtttcgaagatatctttagttcattcttcggtggcggcggtgctcggcaacaaccaaacgctcctcgtcaaggttcagatttacaatatcggatggatttgaagttcgatgaagccattttcggcaaagaaaccaagatttcttataaccgtgaatcagaatgtcacacgtgtcatggctctggtgctaaaccaggaacaagcgcccaaacgtgtcacaaatgtcacggtgcaggtcaagtccaagttgaacgacaaacagctttcggccgcatgatggctcaagaagtctgtgatgtctgtggcgggactggtaaagaaattaaagacaagtgtgaaacatgtcatggaacaggtcacgaagatgaacggcatactgttaaggttaaagtgccagcaggtgttgaagatggtcaacaaatgcgtcttcaaggccaaggtgaagccggcacaaacggtggcccttatggcgatttattcatcgtcttccgcgtggcaccaagtgctgaattcaagcgcgatggcgcacaaatttattcagaagtcccaattagctttgtccaagctgctctaggggatgaaattgaagtcaacacagtccatggtcctgttaaactaaaagtgccagcggggactcaaacgaataccgtcttccgtctacgtggtaagggtgcgcctaagctccacgggacaggtaatggggatcaaaacgttacagttaacatcgtgacaccaaagaccctcaacagtaaacaacgtgatgcgctaaaagcatttgcagtcgcaagtggtgactcacttaacccacaagacaacaacttgttcgacaagattctgaacaagaaacacaaaaaatagaagtgcgtcaaaagtggttatcctgtgaggattagcctaacagggcgaatgattgctgtaagcatgtgtagctaaccggaataggatgcttttgaaagcacgttaaaaatagaagtgcgttcaagccggttatactttgaggactagcctagtttcgtgaatgagcgacggagtcgatcgtttgcgggacgtagctagccgcagaagtatggtttgaaaagcacgttaaaaatagaagtgcgttcaagccggttatactttgaggactagcctagtttcgtgaatgggcgacggagtcgatcgtttgcgggacgtagctagccgcagaagtatggtttgaaaagcacgttaaaaatagaagtgcgttcaagctgatcaacttttgagcattaataccaaataggtagttatcccgaaatttgggatgactgcctattttagattaagcggaagttgttgcaaccaagagcacgttaaagcccctctaatccacaagattagaggggctttttttgttggagtggataggtgggagatttttgaaaaattctgttataatggcggtaataaattaggacggaaggtgagtttcatggatgacaaagacaaattagaactcgaaattgcacgccttaagatggaaaatttgaggactccttcatctttaaataagtattcagcattcttaagcgaccaatcaacatttcttttttgtttctcttactcatgccagtgacattaccaccgtgtcgaacatagtccattaaagtagcagaagtcgccgtaattttaaaatgattctttttagcaacaagaaacagccactgatcatgcatttcgattttttctggaaaaggcaacgcggcatctaataatcgtctcgaaatagccatcatggcaccagtataaccatttttaattaaattactaaatacactttggtcaacttggttatggttgtagtgattccatgactgatcaacaacctctccattctttccaataacagttgcatcatggacaattaaatcagcgtgcccatttacataagcatcttgaataatttccactttatcatcatgccattcatcgtcttggtcagaaagaaaaacaagattgcctgtcgcaagtcctagtgctttctcaaacgatttaattggtcccatattctgatcgtttcttttcagaattgtttgcccgttaaaattgaccaacaactccctcagtaaccccattgtatcatccgatgaacaatcatcgataatcacaatttcatcttgcgcggttaattgcttgataattgattttatctgtttgggtaaggttttgacaccattataagttgccatgcaaacagaaatattagtcactctgtctcaccaaatctttcatttaaaacggtaagaatgcatcattcttacccattttttcatttttaaaatccttgtaggctgtattaactagtttgacggcagcaaatctagaatattggccttttttctttaaaaaggcacccattgcatatctgaaatgttcataccgtaattgcttagctagaatttgttggttctcacaatgtaacttcatagtttgccaacgattacgataaccatagtagtccttccagccaattggacgattaacaccacttgctccgacactattattatctgttagatgataaatcttagcttggatattattgatcatttctgtttccttgcgaatacgaagtgagtattcaatgtcatcataccaaataaagaaattcttttccggtaagccaatcttctttagcacatcttttctcaaaaaaactcctacaaaagtagcaatatcaactggaaaattaccttcatagctcgttaagtcaattttagataattgtagccggtccaaatcatcaattttaacacgatgttcggttccaatttcaccatcttcgataacagttcctgtaaaacaaccgatatcggcatgtttttcactaagttcagccattttcttcatataatcttgatcatagactgcatcatcgtcagcgatactaatccaatcaatttcaggcaactcaagagttgccgccaaggccatattaaagccacctgcgccacccaaattatcttctgaatgaatgactttaatttgtgcgttatcgcgcgcttttgctttcaaaaaatctagcgtatcatcagttgattgattatcaacaaccactattttttcaactggcgcggactgctctaataaactatcaatcgccttttctaatttatccctacgattatgggtcacaataactgctgcaactttcaaattcttatccacgctttcttttaaacaataaataatttaataaatagaaatttctctgcttaatcagtaatcctaatagtttctgtttcattggcatattgactaatctcgcattttttatttgcttactaacaacaggcgtttctagataagtcttaaactcattttttctttcctgatatgacttagagttgcttagattacaaaaatctgcaaacaagagttcaatcgagagtctcaacatataagaatccaaaaataatgcgttatctgattgttgtaaccaatctactaaatcatcgttcagatcattcgaaactgtaatgaaactttccttaaccccttgtcggtaactattactaattgaattatcatgatcaattctatagtgatacagtatcgaatcaacaatgttaattctagggttcttcaagaaaacctcaatgctaaataacgcatcttctctcttaataattcctgctgggtaaaataattgattagcttctaaaaaagactttcgaaacattttggcccatggtgttccaagaaaatatccataaatgccattataataagcgccatccgaaagcgttgcacgaattaaatcatccattgataccggtgtagcgggaaatagcttatctttaggaaaactattttcaactttaccgtcttgatatactcgatcaaaaccaaaaaagataacatctgcgttagtacttgctttttctaacaatatttcttcaaatttctctgctaataagtcatccggatcaacaaaaagcagccaagttcccttagcagctttaatccccgtatttctggcaaccgatacgccctgattagcttgttcaatcaacttaaaacgcttgtcttcttctgaaaagcgtctacaaattgctactaaatcatctctagcgccatcacttattagtaagaattcaaatgaagttgtcttcgccaactttaagcgttccaacccagcctctaaaattgaattttcagtaccatagattggtaggatgaaactaattgtctccatcaaaatcctcctaaattttcaagtaactcttattagaataatctgcgtatgagtcgattagtgcaaatataattggatatgctagttgtaagctcaaaccagttgcttgaatcatatttgaataaatagttaatgcaaatattgtatttaagacggataacccgacaatgaaaaatcttgaattcaacttatataagaagtacagatacacgtatgcacccgcaaagataataatgacgtacatagtaacaccaatccaccccaataaacggtaaggactacttaatgctgtcccgacattcaattctggtgtaatttgttgaattttgacctctttataatctgaattagcaagtgctctcttaccaatgaaattgggcagtaactcaccaaaaaacatactatttacttttgaaactgttattttttcagtagtcttgctataatctacatttttttgaaagttagccacgggtgatgaagcgtaaatataaccccaaaagaactccttaggaatcttactacttttaaatttttcagttgcaccaccgatttgcataattgacgctgaatcaaaagctgatcgaccattttgatatgacgtgttcactcgtgcatttcccataacaccaaataaaaacagacccaccataccgaaaatcgctaaaccaattatatgtctaactttaattttcttccagattgctagaataaaaatggtaaaacagtttatcatcaccatcatgaacattccgcgattaacttctaaaacatacggaatacaacttagaacacaaagtagtatatattgatttctcaacttcccagttgaagagaggattagatgccacaagtaggttgttaaaaaagctgtcagagtgagtaaaaaaacgtgaactgtcggaattccaaattctgtataaccggaatccttaccttggagcataaactgtaatggaaaaccatgattgtaggctccttcagctaatgtgcctattaaaacaataaccactaaccaaacaacatttgttgtactcttaattttcttaaaagatatcacattacttttatagataaagtatcctagtacgccggctaacaagaacattacaataaaaaagaaaataacatcactcgaaaaacttggataaatactggaccagccaaaaaagaaacttagaataactgctgaaaaagccagaatgaacataaagaacggattaaccaaatcgttccctcctaattctttctacgcataacaataaaatgaatagcactgaggatgaagcccaatactgcaccatagatgatgcccataatagaatttgttttcttattactaaagcctattgttgcagttgtatcttttgaagcctggtcaatcacaactaacttactcttctcgtcatcatacttgatcacttcttttttcaaaagctctgtcgcatacttagcacctttaatactcttggcttgcgtagcgccagtatatttcacagctatgactttagatccgttgctactatcaattaacaaattatcgcttgaataatctctaacctctttagtcatagcctttttaaagctttgtgtcttacttaaactattaattgattgccaaaaacgctcaacatcgttatcaaaaataccgttaccttttttgtcttcgacataccccttgttaacatatactttagctgttgtttcgtaactaattgttgatttggcagtcatgatcccaacagcgccaccaatgataattgttacaaaaatgacccaccaatattttttaaaaacaacacccacagatttaaatcccacaccattttccatttaacttaactccgtttcttagtaatttaaaataatctattttattgtagcataaacagtgtctaaccactattcgttacctgtaaatctaaggaattctttaaagatttctagactttataaaatcttcaattattagcttgagattacaatggaaagcctctttaaacgaaactgcaaccattttttgaaacaaataaataaaagtaaaattaggtaactacgtgcgccaagtataaactagcacgtcgcttttccagcctaaccaccactcatacctaagtttaaaatcctaatgcattctagcttagtttcataggggtatcaattattagccaaattaaaaacacttccgatttaaattttatatttatcgaaagtgcctattatatatctgtatccaattttaacttcagtttctcacggataacctgttattgtctacaaactcattaaactgtatataaaataacacagaaagctaggccaccaattccaattaaaatgtgcgttaaaatttgatattctttctttttctcaatttgatcatataaatagaagcaaccaaaaataagtgcctcatataaaaataggaatgttcgttctcctgatgcccaaattgttggtgaaaaccccatcatgattctcgaaataagtccgagtaacatagctaccataactaaccacattcgtttagagtttcccgaagaaaatatccccaataaaacaatgcagcttactacaatcagaagtaaatctggcaagatagattgtaaattggccaaagagatatctgtcccataaatagtaacagcaccccccattttctttaatcctggataaatttttccaatcaaagtatctttaaaccaaaaaatcacgctgaacagtaccggaatatagaaaactgtacgcggtattttatatctccccttctgatttatataaaacgcaaaaagtaaaatcacaagtattgtcgcaagcacatcaaatgaaaaaaagaagtgacctaatgtactagaaatacctaactcaatttttttaaagggtgacaaagttggaaataatggtaaccaatgaatttctttgacttttctaacgctatttcctggtgctaaaacaatcataatcaaagacaatacagtaactacgaattgaaatgccaatctccccagtgcctttttatttcctcttgttacgtacaataacaatgaattacccaataataggataattaccatttgttcttgattaacagcatagattaaggctaagaaagcaacaactgaaattatttttttatgtttaatgtctattcctaaatattgagctaaggaaggtagcatcgctaataaaccggcagctaaaacccataggtaattggttgtggttgccatccaccctgtctcgtagaacatattgaaaggtaataagaagaacatcccaaaactaatcaatagacgactagcattctcatcatcatcagttcctttaagaagcaatagatacgggatatagataacagtaaacattgccaatgtgtttaataatcgccacagaattggtaagtgcgttaatgttgataataccgattcaattactagtcgagaagaccatcccgtatatcgactatgtaaaaattgtagatagtgttttcctagaacaaattgagcaaacgccttatcatcgccaccattgggtgtgatcccatttcctgttaaattaatcgataaatttagcgctattaataaaataacaattaaaataatcgcccatatttccttttttttagttattttctccatgtgaaatcctccaacttttttgacctcaataccatgattcctaaactcatagtatccatcttattattattgcatgacactagtcagtgttgtacctatttccgtttaaaatccaaaatcaacctcaacataacagccatatttgctatgcccgcaatgatcattactaaccactcatttttcaatggttttgcaacaacacaaagcttagccttttttttatttactaattcgttagaactaattgcgattgttccgtatgtttggttatgaatccattttactgtctgtccatcaattgtcacccgatagttaaatctattataggctgctactggcgtcactaaatatttattcataactacgtgtttgatcctcatatgatatgttgcactattaaaggatggcactgaatttccaaacataatcggtcctttaatatcactatacgcagctttaaccgcatagtccacaccgctttttggtccagaaaaagccggaaaataatcaatagtatgcagctgattattatacccactttctaaaatattagtcggcactatctcctgataaaaattctgagttctataaattgtcatcataccattaattagaaagattattattggaacacttattagccatttcgcccacaacgccttgactttaatcatcatacgcataaccggtaccactaagaatatagccgctaacattaataatctacccaaaaattgaattactttaataggctcaaatattttaaggtgttctgtaaaatcccaattcacaaaatcgaatccaccaatcactagtaagagtccgataattcctacaaatgcataataaccgtcgttatcttttcttcttacaattagataaataattgcaataaaggccaatattagaaaaagggtccctatattccatgttcttgcatttaaatccgtaagcgctaatggatgaagtgtatgctttaagtccacaatatatgtttgcggaaagatagaagattcatttagaggtgccgaaatattaggtgctaagtatcgattatgcatacttaacactaaaaaattataaatagtaactgcagacatcgggattgtcaaagccgctgcaatacaaatataccgagcttcttcccaattaaacttctgcattaataatctaactatttcagccaatattaatactacaatcaaaaacaacaaggatagaatatgtgaattagcaattagcgaaacacctaacgcaagcaaaagtattccaactttttgacgtttccatatcttaacaattccccacgccaccaatggaaacattgtatagccaagtagttctcctaaagcaaatctcttatatgaaagtactaggtgataattattaaataaatataaaactgcaattgaagacttgatccacaagttattggtgaattccccgataaatccaaaaatatttgcagaagcacaaatgttaaataacaaagcgaatataaatacttttaatctaagttttatcggtaataatagcggccaaataaaaagatacaaggaaaagaaaggatacattgaattgactcccaatccctgtgccgaaaattctaaaaaattaacttctacaggcagctgatacgcctttaatgatcccagtaaacttcttattctagcaaaatgaaacgtccaatcctcaccctcactacctctaactactcctctagtaagaaaaaaaggaagtacctcaagatttaacgacgacgttactccaaattaaccagcgaccgcttaaaatactcgaatggcaaacaccgtatcaggttatgctgacaaatttgtccaaaaattcggattaaatttgcaatctaccttaactctaaattaaggtatatttcttcaaataattttttagcattgtgttcgttcctaacctcaaaaatctgaagaagatagtctgaaaattcggtactactgtgatcataagcagtgaatgaagtctctaatgtgactaaatcagttaaatgttttagtaaaacgaatatagatgttttatcaacggtttggctgcgcctggtatcttgcaaaattttggaagcttcagttatgaaattgtcgaatacttttttattagtatagccgggtgtgttttcaggggtgggaaagggcttatatttttttctaaatagcttcatgttgattctgtaactacctttctgatgtagagagattttctatttggatttggtgaattattctaaaaagagtagcttttgaggtattaaaggctgcaattgtttctttgattgaatggtttttataatactcatagatagcttgttcatgggggccaatcctacgtcttggacggccctctctatagtttagattgtgtttttttgaatactcttttcctgcttgagtacgttctacaatcatatcgcgttccatttcagcgactgatagaagggttcgaacaatcattttacccattggtgtattttcaatagtccctagattgagaactttaatactaatattttgttctagcagtggttcaatactatttaaggcttcgcgtgtgtttctggcaaagcgatcaagctttgtaataaccaaagtatcaccattcgagattgtatttaatagtagatcaaaaataggtcggtgagttgttgtgcctgtaaatttttcagaataaatattttgaggattaacaccagcgtcgacaagttgagcaacttgttcttctaaattttgacttgaagttgaaacccgggcataaccataaattttaaccaaaaatatcactcttttctgagactaagaatatgagactctacaaatcccagtatagcacacttttaaataagtctcaaaaactgtacagtttttgagactagcgtagtgattaaatgaatttttccatgattaactagtctggtgtgattaaagggctaacttcttccatttccgaattttggttctaaaatttgtaaatggcgcaatagtattaacgtgaaccctttataaagaagtaaaagaatggataacactattgcctagtgttatctattcttttacattactaattaaccaaatatggctgaagcagaggggactaattttttgtgagcaacgaagtggatgaattttacactctactttgtgagtcgtttaaaagctgcatcgatatcagtagtttgactattatttaatatttctttaaatgaaccttcaaatatacacctttgttgatctataaatacaatatttactgtcgtatcttttaaatattccaattgatgtagtgtcagtatcacctttttatttctatctgtattgagtgatgtaattaatttcattattaactcagaatttcgtacatcaacaccactcagcggttcatcgaataggtataattccctattaagtagacaaataccgtacgttataaccatctgtctttccccgcctgataacatacccatttttatgtgcattaacggacctattactttttcatatacttccttcattatccgattatttacagggtcatcttgtttatcaatctttctaaataagtctagtgtctgttctacagttagagttgggaagaaagtagtatgttgcaattgatacataatattacaagaatcaggaaaatgagataaataattatttgtagtttttgtatagagcccagcaattatatctaataatgtagacttccctgcaccattaacaccgataatagcattaatagttttgtcagaaaagttaacacttaaatctttaaatattggttcttgctggtatgaaaaatcaagattgttaatttccattgtaatttctctacccccgatctattaatggtcgtatattatattttgctacagatgtaatgccaatgactaaatatattatagttacaaatagtaattctagtagtgtattgattgaaatcccactaggaagttgactaatagtgttaaatccaatagacaaatacttaatagggtttaacaataaaaggctgtcgaaaataaaattcttactcgataatgttgctatagaaaaagaaagaaaaataaaaaatgatataacaatacttgcactctcaattctgattctaaaattcagtaatacacaggatcctaatacaacgggaaccgttaataacaatgcggctaactctgtttctagcaacagcgaccataacaaagtatgcgtaataatcattaccacaatattaaagataagtagttcgagtattatgaaagtgaattgaacaaataaattgcttataattagtgtccatttagattttgttaaaaaatataaaaatttatagtaccccgactctctataaacaataagcggtagtatcattaaatttaaaacacttataaatactatataagaaaaataataactcacccctgaaataatttgagtcttacttaaattagttgttctaagtaaaagataactattagaaattataaacattcctattggaagcactatattaaaaataaaaacgaacttgttactaagtgtatcaattaataaaggcttgtacagtgaaaaaaatttcttcatataaacacctaccaattctcaatttttaaatgattttagaaaaggcttaactaaatataaactaattatttttgctaaaaagtctaagatcactatcaagtattgctcctatcctagtatttggtacataaatttctgaacagttgtgccataattaataaaacaagataggagcaatgtgtttaactggactattgaaattgaatattgcctacgaaaatatttttttcagtataaagctgagctgatttagaattgtgtagattaatacggcgtaactcttgacagatttcttatttaacaattttaagtgcatcaaatataactttataaactttttgtttaataattagttgaccagttaactactaaaattacgttatagtggaggaatcaacctttgaattaacttttagaacttattgatattaaaaaactaggtatccgatttattaggatatacctagttctataattctgttagtttttacaaaaaatactaaaagtactgttatttacgatactactactgctactactaccacttgatgtatcctgcttagctggagaaacttccccttttgagggtaacgcttgtaaatttaaaatactattcatgctttctcagctctttttaatcaatataccatttatttttaattaatcaagattaattttaattaaatatcaactttagcataagccttaaaaaagtagatgtatataaagtgcaatttaaaggttcaaaaagggaaaggtaccgtttacacattgctcgttattgtttcttaacaaggcggccatcttcaacttgtcattttaagggtaactgaggctccgcttgtaactaactactgcctagtacatcaaagttaaagcgggtttaataccgataatcggcgttaaactcgctttttgtatatctatttttcttgtagcgactccaattcaatttgctgcttaattttaaaaagaattactttagaaatattaaaagcttctaatgtaatgattctgttaatatccttaaagaccattttttgagatcgcagaggtagatgaatatatatttcactatatctaagctatatcagttacttcaggatggtaaaaaaatacaagttattgacgtttgtgcaaaaaataatatgatcaacaacatataaattcagctataaatacgccattaggtgatattcgtaaacgcgtcaacgaacttgatagaaatattttgactgtgacttactgtaataaaggtgtaaccggaaatgccgctcagaatttacttcttaatttgtggtttacaaatgtctataatttgagtggttaccataagaattgccaaacggtcgtaaatcatgttaaatattcgaagactaacctctaaaaaggtgatcaatagatatacaataatatagctactcagtcccaatttcgttaaatcaagagatggagaaataaactagttgaattaggttctaatctttttgagtaaaaaaatattaataaagtaggtgtcatgtactgttcagtttttgatacttaaaaaaccaaactaagaattaagtttggtttttatattttatttgtatacaattactccttatttatcttatacttttcaattattttgcaatacttttgctttctatctttgtcccatcgccaaggagaacttaatctatttgcaattgtatggatactgaaatttagtttattaaacatatataaataatttgtatcagttgcggttggtttagaaataaattctctaatctcgctatttaagtaggaaagctccaattgaatatttttctgatcaactgctaattccgtgaaatttatcttttctaataagtgttctgagatttcgagtaatattttaagctttaaatcaagttctgacttgtcaatattcttttgaacagcttctttattttgtattctcgcatattccttatttaaatcgttgataatttgttgatcaaccaaaaaagttctatttatatcggacattacttgttctaccgatgtaaacgccattctaaaaccatattgaacctttagttttgctcgccaattattttgttcgtttacactgagactgacaagtccaatcccaattgttgtgataaaagtagctttcatatcccataaaccatcaagccaagaactatacttctcgttggtaaacccccacagctgaactatgatgtaaaacagtaacaaaaatattgtggttactgtgagagaaccagcagataatgctattcttttaaaaaagcggagaatacgtataatataatttatttgtttcatccataacagcttcattttaccaatgatattagataattttggatcgatacgtgccaggcttgacgtgtaaagtttttgcagtttgtttaacattaagacaacctcaatttttttagaaaatatgaacctctaattgtaatacgcaacagagataaaaacaacagaattgtacattctaaactaattaataagtaataattcagttgacccagcgaacgtatgtttgtataatgtcatttgaagggggctacagcaatgattttcgaaggaccaatttggttagaaaactcagacaaatattttgtactgcattatgacggtagtttacagctgcgacacgaactagcaaatgagtcgacaatcttaatagatagttgcaactatttttatgatcgcgatcaacttgttaaaatctgtttgaagcatattcctaacatgaccatgattgaatttggccacgtccagaagtctttagattatcaggctaacgctttaagagaaggtatgcccaatgtacgattatgctaaagagtcgcgccgcgtcgtgtttatgatcgattcaaagtcgttttacgcgagttgtgagtcagtcgaacttggtctgaatcctttaaggtcaatacttgtcgtcatgtctacggctgaaaacacaaatggtggcttagtactggctgcttcaccaatggccaagaaactctttggaattagtaatgtcatgcgcaccagggacgtacctaaagataataggatcattgttgtgccaccacgtatgaacctttatatcaagtataatctggccattcatgagatttttaagagttttgcggcagaagaggatattcaaccctattcgattgatgagtctttaattgatatgacgaatagctggaaactttttggagacagcccacgagaggtggctcgaaagatccagctaaaggttaagaaagagctgggcatctatttaacagttggtatcggtgataatccgctactagctaagtttgcgcttgatatggaagctaaacgtacccacagtctaattggtgaatggcactatgaagacgttcaggacaaactgtggccagtgacacaacttgatgatctttggtcaattggccataagacagccgagaaattaaataagttaggtatcaattcaatgtatgacttggcccactataacccgtttcttttaaaacagaaatttggggttattggcgggcaattatatgcgtttagttggggtatcgatcgggcgttaattcgtgataagtacgtacctaaggctaaatcgtatggaaacagtcaggtgctaccacgcgattataccaagcaagaagaaatagagattgtcttacgtgaaatcgccgaacaggtggctacaagaattcggtcacatcataaagcggctacagttattagcttaggaatcggttattctttcagagcaaaggaggaaaccaggaaacgtggttttggccactctatgaaaattaatgccaccaatgataacggacttctagcagcttatgctataacgctttttcgtgataagtggcaaggcgaagccgttcggaacatctcaattagctgtgctggtctagttgacgataatgttgtgcaattgaatttgtttgatacaaagtacaaaactttaaaaaatcgcaatcttgatcgtacggttgatgacattcgaaaaaaatatggtttcacatcactgattaagttatcaagtaaatctgttggcgcaaccgctgtacaacgtgctggcttagttggtggccacgctggagggaattcctatgaataaacaagaatttgacccaaacctggtaacacagtttttaaaccaatatcaagaccgaggcatgatgaagtggcaaggattttacttgagtgatcatacggctagtttgaataaggtagatcgtgaagacgaaattaaattaaatcgccggcatagtgaacaaatggcgcttaacgagattgaaagctgtttaagtcaggctttggaaaagagtcaggttgttagagtcgaacgcagcctgcaagatcaaaatggttatgtggccccttttattgaggggaaaatagaaggctattaccaggataaattgatgattggtggcgagtttatagccattaatgagatctatgcaattagcttgatgaaataacaaactagcattaatctaataaatgccaagaatatgctaggttttgtaaccgagtatctatttcaatatattggttatacttttttactattcaccgtatcaggttatgctgacaaattcgtccaaaaattcggattaaatttgcaatctaccttatttataaatttaatggattttaaagcgggctaataattatttagcccgcttttttgcgtcttatcgctttcttagcttatggattacttattaattgccaaacaaaatattgtacattgaccgattctattcgttaaagtttatatataaataatgtccattattacattatttatacttacttataattcgatcgtcccccttagactgatgctgggatggcaattatcgatactaaagtatttttatgaggagtgtatgatgcaaagattaaagtatttttacaggcgacatgccttaacagtaaccctattattttttggactattaagtattgcgatggttgcaatcgtctatttacagcccaataaaatcctgtctggttctgactatcatttccacatgaaccgcattgagaatttggcactttcgattaaacagggagagtggtttccgagaattagttactttttcatcggcggaatgggctatgcggcaggtcttttttacccagatgcttttctctacttaccagctattctgagagtagtaggactatcaatcaaagaaagttttattgtatttgcaattgcgattaattttagtacgtttttaatcacatatatttcaggaaagttagcggattttaataagaagcaagcattaatattctctttgatgtacggtcttagtatttatcgttttgcagatttagttaatcggcaagccattggtgaagtgatcgcgctcacctttttcccattaatgattgtgatgctaacgcggttaaaaaaaggtgagcaccggtattggtatctgttatcaatagggatggcaactattggttatagtcatatgatttctgttgaaatgatgggcattgtcatcattatttataccttattaaatctcaagggattctaccaaaataaaagtttaaagtatctcattgctgctggcttattagcaatcggtttattagggcgttatttcttagcggttggaaaacaaatggcaaccacgacttttcaagtaaccgcacaacccctagcatttttatctgaccgcacattaccctttaaagacattgttgttaattcattaacgaatgctgtttttcatgcgaatactgtgaatgtcggtatcacgattctactcggattaggcatcgcgtgtggtctattttactattccaaaaacgaccgtgatttaattgggattgcgttggggctattcatagctgcgacgccgattatgccttggcatttgttggatcatacaattatcaatacgattcagttcccgtggcgtttttttgccattattacggcaattgtgagttatttagttgctaaggatgaatgtcatttattaaagaataagtactacttttatctgctaattctgttgttgggcgcaggaaatgtcatctactctacgaatagtattcaaagccaaagttggcgctttagaacgaatgctgcctataacacgcccaacccttattacattggggccggacatgagtatttacctgctcaaaccgactaccagaaaattttgcgacataaaagacaggtcgttaagtatcagccgcataaaataaaaattacaaatgtacggcatacatggggccgttatcagtttgatttcaggacactgacggatcaaaaagcagttgttgaagtcccctttatttattacaaagggtacgttgccgaactcaaccatcatcagcgattaccaatgcagatgaataaacgaactgggttaacacaagttgcgttgaagggaactggtagaatcaccgtttattatcgaacaactacgattcagagaatagggacggtgattagtttgcttaactttgggatgctgatcataatcattcataaagaaaaaaggcgagctactaaatagcgcttattcacggtactagactaatcctcgaaatataatcgcaagatgacgcactctgtttttaatgttaaaatggatgcgtttagtattggaggattgtcggatgaagaacgagatgaaatattatgaaatctcgcgtgatgagtggcgggtttttcatggccgcggtgacgcgtatactggcatcacggacacggagctggaacagattcggggattgaatgatcggatttcacttgcggatgtgagtgatatttatttgccattacggcatctgatacagatgcactatgaacagtaccagatgcgccaggccgaaaaatctgaatttctagagattaagccacataggacaccatttatcattggcatcgctgggagcgtcgcggtcggcaagagtacgacggcgcgcttgttgcaactccttctcagccgggcctacccggataagaaggttcaaatgattacgactgatgggttcttatatccgacagccacgctgaaacaaaaaggaattcttgataaaaaaggctttcccgaaagttatgatatgccgcatctaattcaatttatgaatgcggtcaaaaataatgttggaccagtcaaagcaccgaaatattcacatcagatttacgacattgtgcccgacgagttcgacgtgattgacgatccagatattttaattgttgaaggaattaacgtactacagttgccatcaactgagcagatttacgtcagtgacttcttcgacttttcaatttatgtcgatgcgcaagccgacttaatcaagaagtggttccttgaacgtttcgatctattactcgatttagccaaagatgatccgaccaactactattatccatacgccatcagtgaccgacaaagtgcattcaagatggcgcggcgggtatggcgtgacattaatttacaaaatttaaacgaatatatcttaccaacgcgtaatcgtgccgatgtcattttgcataaaacgaaacatcacgtgattgataaggtattcctacgtaaatattaataatagaatgagttttttcacaggaaggccgtcaatccattgacgttttcattattaatcagtaaaatagatacattatagtttgacttagtgttatgaatctagcaatttggtgttacttgttcacaccaaattgctttttaaaaagaggagtgagttgtttggtccaaaaggacatgcaagatttcgataagattatcgtattagattacggtagtcagtataatcaattgattacacgtcgtatccgtgaattcgggattttctctgaattgttgcccaacacgacaacagcagcagaaatcaagaagatcgcccctaagggaattattttctctggtggcccaatgagtgtttacgatgatggtgccttttcagttgaccccgaaatttttgaactagggattccaattctcgggatttgttacgggatgcagttgatcagttttaaaaacggcgggaatgttgaagcatcaacagaacgtgaatatggtaaggctgaaattacagtcactgacaaagacagtgacttattcaaaggccttcctgaaaaacaaacggtgtggatgagtcatggcgacaaagtcacagcgattccagaaggtttcgtaacggttgctgaaagtgataatacacctttcaccgccatcgaaaaccgtgaacgtcggatttatgggattcaattccataccgaagtgcggaatactgaattcgggaacgatattttgaagaactttgcatttggtgtctgtggtgcccaagacaactggacaatgaacgacttcatcgacatgcaaatcgctaagattcgtgaacaagtcggtgacaagaaagtccttcttggtctttcaggtggcgttgattcatctgtcgttggtgtgttattacaccgcgcaatcggcgaccaattggtcagcatctttgttgaccacggcttactccgtaaaggcgaagttgaacaagtgatggaaagtcttggcggtaaatttggtttgaacatcatccaagttgacgctaaagaccgtttcatgagtaaactcgctggcgtttctgatccagaaaagaaacggaagattattggtaacgaatttatccaagtgttcgacgaagaagcaactaagttaaacgggattgacttcttagcgcaagggactttatacactgacattattgaaagtggtacaagtactgcgacaaccatcaaatcacatcataacgttggtggtttaccagaagacatgcaatttagcttaattgaacctttaaatacattatttaaagatgaagttcgtgaccttggcgaaaaattaggcatgccatatgaactcgtatggcgccaaccattcccaggtcctggccttgggattcgggtccttggcgaagtcactgaagacaaattaaagattgtccgtgatagtgatttaattctccgtgaagaatttgcactcgctggcttagataaaactgtatggcaatacttcacagtcttaccaggcatccgtagtgtgggtgtcatgggtgatggccggacatacgactacacagttgggattcgtgccgttaactcaatcgacggcatgacagccgacttctcacggattccatgggatatcttgcaaaaggtttctgtgcgaatcgttaatgaagtcgatcacgtcaaccgcatcgtgtacgatattacgagcaagccaccttcaacagtggaatgggaataaaatcctaatcaaaacaccgcaagtcgtttcgacgacttacggtgttttttttgtgcaatcaatttaggcttttaacggtacttctttgaaatcagacgcaatataaggtaccatctaatcaatgaaagtagggatgattgatgacaaatgggcaacaattagcgaccagtgaaaaaattaaacaagggattgtctttgcggtggcgaagttaattcaaattctccctttaattggcttaaccatgattcatagcgggcagtcagtggcgtcttatatgccgtatatcttattctataccgcgttgaaaactggcttattattcgtgaatagtctaggccacgtgcagaattcatttaaaataactagtatcagtatgctgctagctgctggcgccttattgctattggctatttcgccttggctgtatttaacggacatggcggcctttatcctgggcgccagtgccagtgtgatcatgccaacctatgagagcgtttattatcacgagcgggtggtttggaaatggcaccttatgggcactgaaattaaaacgttattggcttttagcctaataacggttggtctgttgaccatcgctagtcatttttcatatcggttagtctttattgttatcatgctatttgtattgattggctttatcggtatgcaacgcttcgaaccgtttgtgaagcaacttgatgaatcggtgttcgtcgaacaaaccaaatcgcttaataacttggaactatttgtctgggcaaccgcgatggcgtttgcgctaagatatctgcgcctttttgaagctaaatttgtctggttattaatcacagtcgctgtcattgggttagtcgcgctaatcttgcgggtgatcatcacgcgcggcactaaaacgaagatgccgggttggcttttggttgcggctttaattaacggggcgtttgaaacattcttaatgctctatatttttgtcgcaattcaaaatcagagtttgatgataggcgcctacgtgacttacggtgcagggatgattttagcccaagttattagaaagagcgtgcaagggcgcttttcgaagttatcagacttaaaagtccaattactaggatttgttgctggtgcgtggttgatgattacgccacatctaattttattaggcatcttattgattagtttctttggcagtgccaacagcattcttttaaatcatcgcgcttattacaccggcgtcacgacgccggcccaaaccttaattattaaatatcggaatacgtatctcggtagtatcctaatgcaatttatcttgatcaccggcttgatgggcctagccgtaatgcggcaacaagacataacggccgtgattgcccaaatcagtggcagcgtcgcaatgtctgacacaaccagtcagttgattcacttggccggcctgattagcgttggcttgctaacggtaattgccggattggctggcagatacttgccggcggtggatgaaaatccgctgatttaaaagtaaaaaaataacggtccctaaatggggccgttatttttgtggtttttgaggattatgttattacttatatggatcttttttggggatgaaaagtgtaaaatgagtagagaggtgccttctagtggttcaatagttaattaaacgaatatgaatgatctaaaagtatgtccggattctaaaggactgcttaaaaatcaacattcttggttatgaggattgagagatatgttaaagagtaagtaactataaaattcattgtaattatgaactatttaaaagatactacacaatgtagttttggtaaaataaaaaatatagattaggaaattgtaggctttaacatagagtgaggtcattttttaagtgaaaaacatttcatactaaataaaataatattaaaaatataattggggaatttaaaatgcgatctagtagaaaaaagattattgatatgtcatccgtggaagcaataagcattggggggttgctaaaaatgacattaactatgtgtcaccgaagcaacttattgatcaaatttgtaattccagaaaagtcggtgctaatttattaattaataccgggcttgaatttgacggtgccattccagcattttcacagtcgttattgaagattgtcggacaatggatgtcagtttatggagaagcaatttatgcgacaaatcattatgaaaatcagacctacttggcaagtggcgagacaaccgattttatcaaaggaaactatctgtttgtctatggtttaggtaatataggtaatagtaatgttgtgctgggtggcgaaaaggcgcggaagatagtgtttaatcaatatccgcaacgcgtaactagcatcacttggttagataatcaagcgttgtttgagtttgagcaggctttagacgggacgctaacaatttatgccaatgcttttcaatatgggacacatttaattgatcgcgtagccactataactgtcgaagactagtgacgaggtagaagatgaaaacaaaagatgtaacgattaggtatcaaaaaacagcgacggttcatagtgatcgcaatcaactggcttggcttggaaagatagcagttgggacatgtttcttgatgtacgtatcatatatccaacaaattatggctaatttagctgggcaccctgtgtcggcgattcaaccaagcgttgcgatggttaatgcgactttgtggtttagttacggttggtttaaaccacataaagattggccaatcatcatttcaaatgtcccaggaatcatatttgggctggtaacattaattacaatttattaccattaatagcaaaataacccgggtcaattgacccgggttatttttttgatcaacttacgctaaattaattgacaccctttatgaatggtatggtaccataggcgtaattagaaaagcgaagggattcgggcgcatgcgacgttctaaatggataataatcatcattggtttaggagttttaattggcagtggatggtggcttttagggaatgcaacgacgcaaaaagcgcagcaagtcaagcaaacagaaaatgaacagcccactttttatttgcatggttatggcggttcggctcgttcgactgatagcatgatcaaagctgctcgcgaacaaaagaatgcgacacaggtcctcactgcaaccgttcgtaaggatggttcagttgatttacaggggcgttggttagctaaaacgacacgaccaatcgtgcaagttgttttcgaagataatcgcaatcctaactatcaacaagatggtgagtggtttaaaaacgtcttagtcgcggttaatcggcagcacagcttcaaacgattcaacgtggtggctcattcgatgggcaacttgacggccgtttattatttattgaaccatgcgattgataaacagttaccccgtatggcgaagatggtgaatattgcgggtcattttgatgggattatcgggatggatgatcagcctaatcaaaaccaggttaaaaaggatggccaaccacaaaaaatgaacgcgacttatcggcaactgatgggactgcgtaaccagctccctgctaaatcgattacggtgttgaatatctatggggatttaggcgatgggacgcattctgacggacgtgttagtaatgcatcgtcacagtcgttgcggtatttggtgacgcctggtgcgaagacctatcaagaaaagaagtttactggtaaaaaagcgcagcatagtcaattacacgaaaatcatgcagtcaatcaaactgtcttagcgtttttatggtaaaacatacttaaaaagtggtggcgacaaaaattaattttgtcgccaccacttttttaatgttcaagacggtagtctcgcgctgcttgttcgagattcgaaatgagagcttgttgttttggtgagaagaactgggtcttacgataggctaacgagatataaaagattggttgtggttcatccaataaatcaagtaccactaagtcatcagcaggcgtaatactggtttcagttagaaaaccgatgccgacattttcgtgaatcatactttttaagacactaacgtcattggtgcggtaaataatttcgggtttgatttgattgacgtccgataagttcttgaagaccacgggatgcacgaatccttccgcgagcataataaatttctcgtgggctaaatcacgaaaggcgaccgctggtttctgggctaagggactatcaggtgcaactacaatcttaaaatggtgacgttcgatgactttagctgtgatggtatcggtttgaagtggcgtcgcagagccaagaagcgcgacatctagttcaccggcttctaatgaagccaacaattctttggaacccccatcagctgtcttaaaatgttgaatcgtgccgttagcggctagcttttgtgctaattttgagaagtagtaagtgccgataattggtggcaagccaaaacgcaaatcagtagcgttgagattgagcatgtcggcctttgttagttcaatctccgctaatattcgcgcggcatgttgataaagttgctcaccactaggggtaataatcaatgattggtgtgattgatcgcgctgaatgagtttggtcgcgaattcatcttcaaggcgtttgaccgcgtaagtgatcgtcggttgactgaccttgaattgatcagcgactgccgtaaaattttttaatttaattagcgcagcaaaataggccaaatctttaatcttcataaaaactcctgtttaatgcagtttagacgtttcatataaatctattttatcataaatgtaagttttgactatcaaatgttgaggcgtgtatagtgaccaacatgatataaaagaaaaggagatttttaatatgaaagcacaacaaattttaaatgatccatttttaaataagggtacagcattcactgctgaagaacgtgcacaatttggtttaacggggatgttaccacctcacgtgcaaaccattgatgaacaagttaaacaagcttatgcccaatatcaatcaaaagccaacatgcttgaacaacggattttcttaatgtcaatttttaatgaaaaccgtgtgttgttctttaaattattcagccaacatgttgctgaattcatgccagtggtttacgatccaacgatcgctgacacaatcgaaaactacagtgctttatatgtgaacccccaaaacgctgctttcttatcaatcgacgatcctgattcaatgaagacaaccttggcaaacgctgctgatggtcgcgaaattaaattaatcgttgtgactgatggcgaaggaatcttagggattggcgactggggcacacaaggtgtggatatctcagttggtaaattaatggtttatacggctgctgccgggattgatcctagtcaagtcttaccagttgttttagatgctgggacgaaccgtgaaagcttactcaatgatgagttatacttaggcaaccgtcatgaacgggttcgcggcgatcgttactacgatttcgtcgatcaattcgtgcaaacagctgaagacctattccctaatatgtatcttcactttgaagattttggccggagcaatgctgctaatattttgaacaagtacaaagatcaaatcgtgacgttcaatgatgatatccaaggcacagggattatcacattagctgggattatgggcgctttaaatatctctggtggcaagatgaccgaccaagtttacatgagctttggtgctgggactgcgggtgctgggattacccatcgcatcttcgaagaaatgttacaagaaggtttaactgaagaacaagcacgtagccgtttctacatggttgacaagcaagggctattgtttgatgatgatccagaattaacaccagaacaaaaaccatttgcgcgcaaacggagtgaattcgcgaatgctgatgaattaacaactttagaagctgctgtcaaagcaatccacccaaccattttagtggggacttcaacccaacctgggacctttacagaatcaatcgtgaaggaaatggctgctcacacagaacgcccaattattttcccattgtcaaacccaacgaaattagctgaagcagctgctgcagacttaatcaagtggactgacggcaaagctttagtagcgactgggattcctgctgcacctgttgaatacaacggtgtcacatatgaaatcggtcaagcaaacaacgctttagtctatccagggcttggtttaggcacaatcgcttccactgcgaaagtcttaaatgacgaaatgattagcaaagcagctcactcattgggtggcattgttgatccaacagaacctggcgcagctgtcttgcctcctgtgacaaaactagatatcttctcacaaacggttgcgaacgctgttgctcaaagcgctgttgatcaaggtttgaataaagaaccaattgctgacgtgcaaaaagccgtcgcagacatgaaatgggaaccagaatacaaagtactataatttaaatataaatcggtaggagcgtgaaagagttggcagcatttctaacatcattatcaagcgttgtcgaaatcgtcttagtcattgcattggggttttggctacggagttcaaaaaaattcgatgataattttaaaggcacaatttcatttttaatcatgaatgtcgctttaccattatcaattttcgtctcagtattagataacttaacccgtgaaaagttggtcggtttatctggcggcttgatctacgtcttaattagtttcgccctcggttatctcgtggcatggttactaaccaaggctttccggattcggccaggtcgtcgagggacatttatcaatatgttcgtcaatgctaataccatcttcattgggttaccattgaacttggcactattcggtgacaagagtttaccttacttcttgatctactatgtggccaatacggtttcaacatgggcaatcggggtcttcttcatctcaaatgatgatccaatcaaagaaaaaggcgctgctaaaggcaaatttaactggcgtaaattattaccttcaccattaatcggtttcttagccgcattaatttatcttttaactggtttaccattaccagaacttgttgataagacattctcaatggtcggtggcatcgtaacaccaatgtcattgatctacattgggattatcttagctgatgctggtttgaaatcaatccatttcgaccgcgatacagtccttgcgttattaggccgtttcgttgtggcaccagccatcatgattgccatcatgctattcttcaagaacacaacttcaattccatcaatcgaacaaagcacattgattattcaagctgcaacacctggtttggctgtcttaccaatcttagttggtcaatcacatggtgacgttgaatatgcaacgaacgttgtcacaacaagtaccgtcttattcgtggtcgttgtcccaatcttgatgcaaattgttcaatatatctaaagcttaaatgtgtcgttcagctgacactcccctaaatcttacccccagcgcgccgtctcaattaattgagacggcgctttttttgtgcaaagaaacacaaagaatgttgtcaaaggcggtaaagtgcattacaatgaaaacggatttaataatgtgaaggggacgatagcatgacagagaaaatctacactaacttagcacctgaaccattgggaccatacagccaagcgattgcaacggatcaactggtctttatgtcagggcaactcggattaaaagatggccaattggcaccggacttagcgagtcaaacaaaacaagtaatcacgaatatgcaacacgtgttagcggcagcaggattatccctagaaaacgttgtgaaaaccaattgttttttaactgatttggatgactttaacgaattcaatgaagtatatgcgcgattcttcggtgatatcgcaccggctagaagtgccgttcaagttggtaaactaccagctggcgcaattgttgagatagaagcagttgcaattcgttaatgccgtaattgactgaataaacaaccatttgaaaaaagcctccagaggaaattaaatgcatttcatttaatcatctctgggggcttttttgcatgcctgaaatttaatgtttaaagggatgttcatgggtacaaatactgatatataggcattgttgtgaaaatattctaccaatgaaattaaaaaaaaactaaaagcgctagttgtagtattcattaaacacttatttccaagctcttttctatggatgaaaccaatttctgtgtatagtatccttctctaacccgatgttgctgaagcttaacttcattttgcaatgtttcatatttagaacgggaaatcgttaaaagttctccgtggagatcttcaagatcacttattgtaatcccgcaaccattaaatttgagccactttcccacattagacattttatcagccacgggaataatgccagcagcaaggtaaaggctcaatttatactgccaattatatttttcataagatttaaaagtaggtttatgatactatttcttagttaaaatatgagtctagtgactatcggttgaaactaaagcaacttttttgacaacgcttaccaacatgctgtaatcttatttaatatataacaaataaacttatgctaagaagtggtgtcggaatattgatattgctacttaagagattaacttggactttaactttacgattaattgactaaaaaatttacttaattgtaaataatggaggttattgaaatgccttggaatgaacaaaattacccaccatcaatgaaaaatttgaaaaaagtggttcgaaaaaaagctattgagatcgcaaatgcgcttaaagaaaaaaattatgacgataagcgggccatttcaattgctacggaacaagcggaaaaatggtatcaacatcgctctgatttaaaagacgacactccattcaagaagaatttaaggaggcatagctaatgatatcacttttggaaaaacacccaaacaaaattactcctcatataccaatagaaaagcctaaaaagcaattaccacaaagatttccagtaaagactccgcctgaaaatccccaaataaatccagaaaaaatataccctgaaaaacaacctgaagagccggttaggcgtgattaataagccgtttatgttagattacaaattccaatttgaagggggccacataaatcagagtgaattcccatgaggcatactaaatacaatattggagactacgttttaaattgcaaataattcggattaaatttgtaatctacctatagtcaaaataaagccagcgaaagcgaggaggacgtcatgaaacaatacacgaaatttttactgatgattcttgtctctacagttattatgtatgggttaatgtaccttaatgtgttccaattagatcatatttttctaagccaaacgcgactgtatatggcgctaattatgggcgccaccatggccattgtaatgctgttattcatgtggtcaatgtaccagaataaacgtttgaaccgcctgatcctacttggtagtgcggtgatatttgctggctcgctttatctagttcgtagccaagcgaccgtgcacgatgcagcttggatgcaagaaatgatcccccatcactcgaccgcgattctaaccagtgaacgcgcgcaactcagcgatccggaagtcaaagccctcgcacagaagatcgctaaaacgcaacgtgaagagatcacggagatgaaacgattattgaaaaaagttgccgatcaatagctgataaaaaataaggaagttgaccaatcaggccaacttccttattttttaggcttacgcaaattgcaatagtaagttagccagtgccgataaagcacacagacgaaagggctcatgggagttccaggtggatcaggattaggcggcgcggcctttgcgcgcacgtgataattcctttcgaaatatttcagctggtgtacagaacttaagtaagcggcgcgggagatggttgagccaagattcagcttgacgggccagactgggtgtagctagatcgagtgattgccccttaggaaagtaacgtctgagtatacgattgtggacctcattagtggcgcgttcggccgagctataagggtgggcataataagtctcggcaacaccctcaagcgcagccgttagcgtggtgaactctgttccgttatccgccgtaactgtccgcataacgtcaccgaattcagccgtaatattttgcatggcataagccacagattcagcgtctttaccctcgatcaagcggacaatctcatagcgcgttttacgttcggtaaacgttaataggacactctcgctaccagcacgtttgccaatgacagtatcgatctcaaaatgaccaaactcgtggcgcgtttctactcgctttggccgttcttcaatactacgaccgagtaggcgctgatgttggtgcgagtggtgctgggtcgtccggcgttttgttttttccagcagatcaaggttacggatctccaatagttgcgcatcgatatagttgtacaaagtcttcgtacagaccattttggccggcttaaataaccggtgcttacgggcataaccaacagcagcgtccggcgaccagccctcatggcagaacttatcatcaaagtaggctaagaaggccgtcacttggataaattttaatggacgtccacagttttgccgctttatttcatagcgattctgagcggcttcagggctgtaaatttcaaagtagtgtttctgattattaacgcgtttaacttgcgtgactcgaccacgcttgagctcattattgacggtctggtggcagacgcctaatcgaatcgctatttgccgtgctgagcatccttcaatgtgccaagcggcgatttgaccgcgttcgatttccgataaatggtgaccttttgggcgtggctaacttaattataaaacgcgcgccccttcgataactaatggttttctaatatttgtggtagtaatagtatagctcaaatttaacgcaatttcagtttccgcgcaaataatcgtctcaaaaattatcattcttgacatgcgacgcgttatttgacgttagtcatggtttaaacgtgcttattagttggtttgttattcgtccgccgatgtgcgtcctaacgtgccaacacgtgtgtacgccgatttcagtatattcaagcattaaaatgtggtgtcgcagccagctggagtgcaagttgggttgcacgttcgagcgaatcgtttgtttgttgttcccagcgggccgcgagtgtgttggccgggtcgtgcagactagttaagatatgttgggcgacttgcaacgcgtgtggttgatgtaaactggtagccatagtttgtagcgcgtcagctagttgttcgccttcagttagctgtcgagtcacttgcatgggggtttcgatggcaacttgttcgttggcgcgctgacccgcctgaatccaattatccgtactagctggcactggtaaccagagcatcagtaaaacgaaccacgttaagcaggtcagttgggacagatcaacgcccgcaccggcccatgggttcaggtctaagttacgtaattccaagtattgaatcccatcctgacatagttgtgaatgaccaccggcatgacgcaatcgaacctgaccgtaaaattccttggtcgcacttaattttccattatcaacggccgcttgcagtgtttgacaatagtcatttaacgacgcgtacgagaccgtaacacccggccgattggtatacccgctagaactgttgcgtaagcttcgaacgggctgggctggtggcgtaagaccagactgtggccagcagcgtggtgagcagccataaagatacgtcagtagccagcgatagtgcaaataattctgcgcaatgtgcaggtaacagcgattttgaaaggtagtgaaatcacgactatctgtctgggcctgatacaatcccatcatcagactagccgctaagcttacatttacagtgaacacctgacaacatttgacgtcgtcggccatagcggtgagcaagtccttgtcgataggcgacagcgaccgcatccaacttagcaattggaatatcccggtcttctcgtggaagtgtgggcggcatgcttagcggccaaatcagttcaggcagaagcctttgccggacttgttgtgtgagcatcgttaaggcgtgcaacgcagcaaccgcacttgcttgcggttgggtgactaactccaactgtgtctccgcaaagtcccgttgcaggccggacaactcgctgataagtgttggtgataatgccgtatccgccaaatgaccggtcaccgttacccgctggccttcccgttccagcccaatctgaacaacctgtgcattgatcaacgccgtattttccattaataattgttgccactccatccactcacctcgctgattcaacctaaatttatcgtagcatagtcccgaccttggttcactgattatgacctattatttagctgacttaccattacgaaatgagtttccgcgcgtccctgcttgatcatccaaaggatcaaaaaaacgagtacccagtattaccgggtactcgtttttagggtaataatatcgggtctagaatttttggtgttggaaattatttccattccaaaagtactaggccctaatttaaaaagccattgataatggatcaaaaacggccactagggtataccctagtggtcattttcgtttctgtgatatactaggatttataaatgttcattagaactgtccaaaaggagaaacggaaatggctaaaatcggttatgcgcgcgtgagttccaaggagcaacatttagatcgacagttagcggctttaaaaggcgttgataaactattttcagataagttaagtggggctaacaccaagcgacctgaactgcaaaaaatgctggcctatatccgtgaaggcgatattgtcctggttactgaattagaccgcttgggccgaaacaaccaggacttaactaagattatgaacaccattcagaacaaaggtgccaccctagatgtgttgaatttgccgtccatgacggggattgcggatcctaacttgcgtcaactgatgactaacttaatcattgaactgtataagtatcaggccgaaagtgaacggaagcggattattgagcgtcaacaacaggggattttcctggccaaacatcaggggaaatatcatgggcgcaaaccccaatataccgaagatgatccccgcttactacatgcttttaagctttatcgagctggcatgagtgacattgatgtgtcccgaaatacaggtattaaacggacgacctttattcgataccgtgtgaaatacggtattaaaagaaaatagggaccctattttctttacttatagttttggagggtgtttactaaagtttttttcttggaatctgattccgtgtttattaaaccatcgacgagatgtcatacaagaatgacaccctgactgtgtatacatcatgatcatttttcatttacccacttttttattttatttaagaaaaaatgattaatgctgagttaactgatctatccgaaaatacatattggtgtagctaataatataagttgacacccagtcaacccaacactagcaatctcaaaaattggttaatggacactccacttgatcggagatatgaaacacaaataattgttttacatacctattttattattgaaacatttatgaaataaatagcatgcacaggaaatattgtgaatttgttcaacagctttgctcgtatggtttccttgcatcacacccctgataaggttatagttatccttgtaatcattatagaacgtttgttcaaaaaagaggaagtgaattttatgcattggttatgggttttaattgttggtgctgttattggcgcaattgctggtgccatcactaatcggggcgcagctatgggctggattagcaatattatcgctggcttagttggctcatccattggtgaagctattttaggcagttgggggccaaatatagctggtatggccattattccgtcaattataggcgcaatagttgttgtagcagtagtttctttctttttaagtcgtagcacaagataaatttttccctatatgttaaactttttaaagcaggatacgcagatcggtagaggaaagcatatgcaagcaagagaattgattcaaacatttattgaaaaagtgattatctttcaagacacactttataaagcagaagaccaacagtacttatttaatctcgtcttagaccttgttggtgaagaggacagtaacgttgcggtgactgatcaaagtctcatcggattaaaggacgcattgttgcgtcttgcagttgcgaatagccggattgagaatttagcggcagaacaagatattttaggggcgaagttgatggatttggtgacgccattaccaagtgcggtgaaccgccatttttggcatcaatacgagagtgatccccaacaagcacttgccgacttttatgaattaagtcgggccaacgactacgttaaagtggccgcaatcgcgaaaaatatcgcttatcaagtgccgacgcactatggcgacttagaaatcacgattaatttatcgaagccggaaaaggatccgaaacaaattgcgttagccaaaacgatgaaacaaaccggctaccccaaatgtcaattatgtctggaaaatgaggggtatacggggcgtttagatttcccagcacggcgtaatcatcgcatcattcgttttgaattggcaggtcagacttggggcttccaatattcaccatatgcttattttaatgagcattcgattttccttgatggtcaacacgaaccaatggtgattaatgaaacgaccttcaaaaatttattacagattgtgaagcagttccccggctatttcgctgggagtaacgctgatttaccgattgtcggtggttcgatcttaacccatgaacattatcaaggggggcgtcacgattttccaatggctaaggcgccaatcgagacaccactacattttaacgggtataatgatattcaggcgggaattgtgaagtggccaatgtcagtcattcgtttgacgagtgcgaatgcaacgcatttggaaacactcgctgcacaaattttaactagttggcaaaattacagcgatccaagtgtccaaatcttagcccactcagaagacggcacaccacatcatacgattacgccgattgcgcggatgcgagacggtcaattcgaaattgatttggtactacgcgacaatcaaacgtctgcagaacatccagatggaatttatcatccacatgcagatgtgcaacatattaaaaaagaaaatattggtttaatcgaagtgatgggcttagcaattttgccaccacgactcaaagatgaaatggctgaggttgaacactatctctgcgatcaaccaaaccagatggccgcttaccatcaagaatgggcagatacgattaaagccgctaacacatcgattacatcagataacgtaacggaattagtgcggactgaagtcggcaaagtgttcatgcgcgttctagaagacgctggtgttttcaaatgcaacgaacaaggtcaggcagcatttattaaatttacgcaacatgtttaacctataaggagggacattcatgaagtattggcgagaagcatttggagaaataaatggtcaaacggtttggcagtattggctagagaatcgtcaggggtatcaattagccgtgacagaatacggcgcaacgattactcacttggtgatgccggatcaaagtggtcagatggccaatgttgtgattggctatgacaccctagcggattttgtaaagcaacaagcttattttggtgcgacagtgggacgcgtagctggccgcatcggtcaaggtgcttttacactcgatggtcatgattatcaagcaccgattaataatggcgccaacacgaatcatggtggccccaatagttttgaatcgcaaatctggcaatcatcagtggttgaaaaagatgatgcgattagtgtcgttttcatgttaacgagtccagatggtgaaaatggattccccggtaatttagcggtgaccacgacgtatacgctaaatgaggccaatgaatggctaattgactatcaagcaacgactgataaaaccacgttgtttaacccaacatgccatgtctatctgaatttgacgggggactttgatcaatttgttggccaacacacattgcaaatcgatagtgaccgttttggtgccattcaaccagacggcttaccaaccggggaattagtcccagttgcgggctctgtctttgatttacgtcaaccgcgagctttgcaagccgcttttgatagtgaaaatacgcaaactaaattggtcggtggttttgatcatccattcctgttgaatcaaacgccgggtaaatcggatgcgattttacgcgatcccgaaagtggccgctcgatcacaattgatacagaagggaatgcaatcgttatttataccgccaatggcttcggggacgaaccaaacttaacaaatcaggcaattcaaccccaccaagcagtggcgattgaagcccaaatgatgccagatgccatccatcataccgagtttggtaatattgttttgcatcctggcgaacaatatcaacggcggacccgatataaactcaattaatttattttacgcttgcatgcggttacaaaatcgcgtataattgacttgtttagatgaccgattctggtggctagataataattgtgtatttaaaaggagtaacatcatggaaaaaggaacagtaaaatggtttaacaatgaaaaaggtttcggctttatctcagcagaaggtcaagacgatatctttgtacatttcagtgcaatccaagacgaaggcttcaagtcattagaagaaggccaagcggtcgaattcgacatcgttgaaggcacacgtggaccacaagctgcgaatgttgtaaaactttaatttagaggaattaaatacgactattctaatttaatttaattaaatttaaattagaataaaatcgttcatgtttataaaaaaatagcataaaagtgttgacttcatttatcatgtgaactatgataagcacataagttaataaagcgattgaaaagcgcagtagaattagtaaccactattacagagagtcgggatttggtgagacctgacatatgtttctaagtcgaattacactttttgttttatcaaatcgtacgttgaatttacgttaaaatctagagtgatattttgaaagtgcactttcaaaatataacacgggtggtaccgcgaaaaaatgacatttcgtcccagtaatctttattttattaaagattgctgggacttttttaatttaggaggaaattttgatgagaaaaaatattattgatgaattaacatggcgtgatgcgattaaccaacaaacagatgctgaaggattgcgtgaattagtagaaaacaacaagatttctttatactgtggggctgatccaactggtgatagtttacacatcggtcatttgattccattcatgatgatgaagcgattccaattagctggacatcacccatacatcttaatcggtggtgggacaggatcaattggtgatccaagtggtcgtaattcagaacgccagttacaaacaatggaaaaggttcaaaaaaatgttgaagctttatcaaaccaaatgcggaaattatttggtaaagatgccaatgttacttttgttaataactacgattggttatcaaaaatctcattgttggactttttaagagattacggtaagaatttcaacatcaatacaatgttagctaaagatattgttgctagtcgtttggaagtggggatttcatttactgaattcacataccaaattctacaatcaattgatttcaaacacttacatgatgaacataacatccaactgcaaattggtggggctgatcaatggggcaatattacttcagggattgatatgattcataaacttgaaggtagcgacgaacccgtatacggtttaacaattccattaatgttgaaagctgacggaactaagtttggtaagacagcaggtggtgcaatctggcttgacgctgaaaagacttcaccatacgaattctaccaattctgggtaaatcaagatgatcgtgatgttattaaataccttaaattcttcacattcttagaagaagacgaaattgaagaattggcacaaaaagttgcaacagaacctgaaaaacgtgaagcacaaaaacgtttagcacaagaagtgacacgttttgttcacggtcaagaagcattagatgaagcggaacatattactgaattactttttgaaggtaatatcaaagctttagatgttgttgaagcagaacaagcttttggtaaagcaccatcagttgaaattagtaaagaagctaaaaacattgttgacttcttagtggatacaggtattgaatcttcaaaacgtcaagcacgtgaagatgttcaaaatggtgccattacaattaacggtgaccgtatccaagaaactgatgcgatgattgacccgatgactagctttgatggcaagtttgtgattattcgccgtgggaagaagaattacttcttagcacgtgttactgactagagacgttccaaaaattaaatgaaggcttttgtatctatactgaatgttactgggttcttcgtgaatgtagatcatatagtataaccccaaaatacaactgcaaaggtagctgtcaaacgttgtttgacggctatttttcgtactctaaaaaatcggaatcgctttcatgtgtttgcttttatggacaatgagcgtattctattgattggggttatactatatctacaatttaggaggattttttgttatgagtaacaatagttttagtgcaaaagatacagatttatctgctctatttatcggtgataaagctgaaaatggtcaactttacaaagatttgttaggtaagttagttgacgaacatcttggatggcgtcaaaactacatgccacaagacaaaccaatgatttcagctgaacaacaaacatcacctgaattccaaggaacggttaacaacatgaaagacgttttagacgaactttcagcacgtttacgttcacaatcagttccttgacataatgctggtcgttactggggtcatatgaactcagaaacattaataccagccattttggcatataactatgcaatgttatggaatggtaataacgttgcgtatgaatcatcaccagcaacttcacaaatggaagaagaagttggtttagaatttgcaacattgatgggttacacaaatggttggggccacatcgtagctgacggttcattagctaacttggaaggtttatggtatgcacgtaacatcaagtcacttccatttgcaatgaaggctgttgatcctactattgtagcaggcaagacagactgggaattatcaaacatgtcaactaaagaaatcatggacttagttgaagctaacggcgacaagattgatgaaatcaaagctaaatcagctcgtggtggtaaagatcttgacaagttaggtaaatggttagttccacaaacaaaacattattcatggttaaaagccgctgatattatcggtatcggtttggatcaagtaatcccagtaccagttgattcaaattaccgtatggatatcaatgaattagaaaaaatcgttcgtgaattagcaagcacagaaacaccaattcttggggttgtcggcgttgttggctcaactgaagaaggtgctgttgacggcatcaacgaaattgctgaattacgtaacaaacttgttaaagaaggcatctacttctacttccacgttgatgctgcttacggtggttatggtcgtgctatcttacttgatgaagataacaaattaattccatacaaagacctacaaagcaaatttgctgaatacaatgtcttcactgaagaagaaaaccttgtttcagaacatacttacaatgcatatgggtagattgcaaatttaatccgaattttcggacaaatttgtcagcataacctgatacggtggtaaaagcgcgcttgtgaattaatggcggcttgatggccggtgacgagactgtcgacaacggccacatccgtgccgcgttgaattaattgatcaacggtgtgtgagccgatgtagccggcgccacctaatactaaaactgtcatcttatcattctcctcttcagttgactgattaacctaattttttagcgccatcggcaatttctgccacgtagaaacttggcgcatacccaatcttgtctgtataaactttagcaacattcgtttcaaagttgtcgacttggtctttagcaacaattgcaatcgcacaacccccaaagcccgcaccagtcatccgagcgcctaagacccctggttgttgccaagcggtttgaacgagtgtgtctaattcgatcccagtcacttcataatcaaattgcaatgacacgtgtgacgcattaactaatttgccgaaacgttcaaggtcgttgttcttcagggcttcgcgggccttcattgtccgttggttttcagaaaccgcatggcgtgcacgtttcaacaagttttcatcttgtagcatgtatgtttgtaaatcaaaggtttcgttatctaaatcgcccaatgattgaatatcattcttcgtttgtaaaatggctaaggccttttcacattcactgcgacgttcattatattttgaatcggccaattcacggcgtttattagtgttcatgataataatcacgttgtcttgcaaatcaattgggactaaatcgtaatccaatgtgttcgtgtctagtaagatggcatggttggctttgcccattccaacggcaaattgatccatgatgcctgagttaacgccgataaatttattttcaaccatgacaccggttttaacaaggtcgacacggttaatttctaaattgaattggtcttctagaatcacacccattaataattcaattgatgcggatgatgataagccagcgccgtttggaatattgccttttaaataaatgtccaaaccactgtcgattgtgtaaccttgttcttgaaggtaaacaatcatcccttttggatagttcgcccagttgtgggccttttgataagataagtcgctgaggtcaaatgaaatgacacccgcatcttcaaagttcccagataataaattgattgtttggtcatcacgtttagcaacgactgcatatgtgcccaatgtaatcgcggttgggaaaacatgcccgccgttgtaatcagtatgttcaccaatcaagttaatccgacctggtgcgaagtagctcgcttccggtgctttgtggaatgcgttttcgaatgcggtatttaattctgtcatgttcatagtaaattcctcctttattaatcgctttcattttactaaacatttactaaaaaatcaatcttttttgttaactatcgctttcttttcattggttatgctaaactaagtaatagtaaacattgaattgagaggtgcaccttggcaacgatcaaagatattgctcaactcgctaacgtttcgaatgcaaccgtttcgcgggtcctaaattatgatcaaacactttcggttggcgatgagacccggcaacggattttcgaagccgccgaaagtttaaactatcgtaaaaacacgcgcaaaatgaaccagcaacgcggacgcattgcgattgttgaatggtataccgctaaagaagaattggaagatctatactacctctccatccgacttggcgttgaaaagaaactcaaagaacttggttatgacgtaacacgcttctttcaaaacgatccatttgatacgctccatgatgctacgggtgctgtggtaattggtaagtacagccctgcgcagattaagcgcctaaaaaaactcaaccacaacctcgtcttcgtcgacatgaacacgctcgattgtgaagtcagctgtgtgatgaccgacttcaaaacaccaattaaatccgtaatcaatcattttacaaccgccggcttaactaaaattggtatgttaactggtcaagagagcactgctgataatactaaattgggaccggatccccgttttattcattttaagacgttactcaaagctcaaaaaaactatcaccccgattggattttaaccggtgactttacacccgaatcaggttaccaactcatgatacaattattacaagaccaaagttccgatttaccagaagccctcttcatcgccaatgatgcaatggcagtcggcgctttacgcgccttacatgaatcaggcatcaaagtccctgaacaactcagcctgattagtttcaacgatacctcaatttgccaatacacgttccctactttaagttccgttaaagtttacactgaacaaatgggccaatcagctgccgagttattggttaaacaactcgccgctagcgaaattatcccccaagtcattacgattggcacgacgctgacactacgcaatagttcaaaataataccttcagcccaccgatgatcaattcatctcgtgggtttttatcttgtctcaaatcaattttcattaataggagtatctcttttgaaaacgaaaaaaattagacgaaccatcttaaccattgctatcttggcagtcggttatctcggtggtcgcaacaatgtcttacaaaatgtgttccctgctacagttgctactgagcaaccagctaaacaaacacccccagtcagtcctgattatcaagccattgctgatcaagattttaaaagcggatctgcggcctatctaccaattaataacgatcaaagccaattaacagcaacggattggcaaggtgaaaaaatcgtctatgggcaactcgaccagcttaaccgaacaactagcgtcacagcttacttatcaaagcggaatctgggcaaatcagaaggccggacgcgccaaatttggaatccaacgggttggcataatcaacctctgattgtcaatgaccgccgaatcacaccgcaaaatcgtggccacttgattgcttatacactcacttttaattttgatcagaatggtaactttcaagctggtcaaccaggcagtttagataatccacttaacctcgccacccaaagcgcgtacagtaatcagaaaacgatgcagatttttgaagaaaaagtccgcactgcgctcgaagcaaacaaaaaagtgatttacaaagtcaccaccgtttttcggggtaatgaactgatgccgcgcggttactgggttcaagccatttcaacagatggcacgctgaatttcaacgattacgtctggaatgttgaacctggcgtcgcattcgattacatgactggtcgttctcacttagatgctagcatgcaagtcaaagacggtcagaatattgttgaccgcaccaaacaacaagtcaaacaacttttctaaacaaaaaaaaagaggtagcaaccagaataattctagttgctacctcttttgctagcttatttttccattgccttacgcaatgcagcggctaatggactttccgctggttcatcttcttggttcactttttgaatcaagcggcgttcttcatgtttagagattttcttcttacgatctttcttgtcgagcatcttttcggtcgtcccatcattaagacaccggaagtatgcgccgccttgcccttcaataatcaccattttcttgtgacattgtgggcagcggtggttggaaaccttcggatctttccgacgccgatagtgacagtttgtgcagacataaattttaccgtcacgcgtattgcgttcttttaacggatgatcacattccggacattttttattcgtcactgcaaaatcgcggtattccgtctcactctttttaatctcaccgaccaaggtcttagtggcaccctcgatttcagtgatgaacgccttcggattttcttcgcctttggcaatcgcttcaagcgactgttcccattttcctgtcagttctggtgaaaccaaggtctgattaaccaattttaaaagttgctgaccttttggcgtcactgctaaagcatgaccttgtcgttctaggagttcactacggactaatttttcgatgatttcagcacgagtggctggcgtccccaaaccgtagtgttccatcttcccgagcaacgttccttcagttaatggcttagggggcgtcgtcaattgttctttaaccgcaaaattagcccgaactaccatcccttctcgccagtcgaccgtcgcggttggttgcccctctttatcggcagcatgccaaccttgttgcacgacttttgtttgcttaaacgtaaaggtttgatcaccaaacttaacggtggctttcgtaacagctgtcacgtatggatcagcaaacaaccctaagaagcgttccacaatcaagcgatacatgcgcagttcatccgtcgataatttttcggcacgaacgggttcttcagttggaattaaagcgtagtgatccgttactttgccatcattaaagacggctttttgtttgacctgactgccttgccccaagtattgcttagcacgtggatcaaatttgactaatgccgacaaccgttccttcaaagtcccttcgatatctgttgagagatatttcgaatccgtccgtggataactgacaactttatggatttcatacaatgattgaatcaaggataacgtctttttcgcggataaaccatactttgcgttggccacttgttggagttccgttaaatcatatggtaaaggtgctgattgcgatttctgcgttgttttgacgctgaccacttggcctttggcttgttgcaattgtgcaactaagtcgtctgccgcttggcgcgtcttaatactttgcggatttgctaattgtaaggcggcttgctgttgatcgaccgtcaagtgaattgtgtagtaggtttgcggtttaaaacgattaatttgttgtgccgtttcgttcacaaaggctaacgttggtgtctgcacccgaccagcggataaattatcttcatacttggtcgtcaatgcccgtgtcacgttcaagccaatcaaccaatccgctttgccgcgtgctaacgctgatgcgtacaaattatcgaattgcttggctggttttaagtttgcaaaccctgctttaatggccttagtcgtttgcgatgaaatccagagccgttcaaccggcttatcgaatttaatccattccaaaatatagcgcgcaacggcttccccttcacgccccgaatcagttgcaatcaccgcacctgaaatatctttgcggttggcgaggtgactgatagcttttaattgtccacccgttttaggcaatggctttaaaccgatatgcttgggaataatcggtaagtcttccaaacgccattgttgccattcttttttgatatcctctggtaattgcagcgataacaaatgcccaaacgcccaagtgatgacgtattgatcgccctcaaaataggttttagttttctgagttgttcctagaactttagcaagctctttggcaacacttggtttttccgtgataactagttttttttgcatttaaaattcctcttacttcaattgatcaaaatagtaactgactaatagtataacgcatgttgagaaggaacaacccagaaatcgcgaaagtatcataaataataatatttcaacagccaaaataaaagattctaagaaactgaattcttagaatattcttttttatcaacggttatacagaccgcggttaatgatgaaggaacacgccagaaattctctggcgtgtttttttgtggcctaatttggacatgcgtcattgtttttgttataatgaaaccaccattgaggaggcactaacttatgcaagtattgattcttgttttaacttatctaattgccgttgaacacatcggtatcatggggctggaaatgtttgccagtgctgaaacaaaggcgaaagcttttgacatgccgctggactttgtcaaactaccaaatgcccgcgtggcactggccaaccaaggcatttataacggaatgttgggcgccgtaattatcatggtcaacctgttattagccggccaaacgctcaagattgtcctcgccctattaatgctctacatcttcatcgttgccctttacgggacatttaccgccaccaagaaaattttcttcttacaaggcttacccgctttaatcacattattgttaatcttattcttctaaaaaagagctttaatcatgacaaatccaattctcatcaccaccaccgaaactattcctggtaaaaaatatgaagtgctcggtgaagttttcggtttaaccactcaatccaagaacgtcttcaaaaacatcggcgcttcattgaaaaatgtcgtcggtggcgaaatcaaagcctatactgaaatgatgactgaatcacgcgatgtagccatcgaccggcttcgccaaaatgcacttgaaatgggcgcagatgcggttgtcatgatgcgctttgattccggttcaatcggaacagatatgcaatcagttgccgcttatggcacggctgttaaatatatcgactaacaaaaaaagatgaacggttccctgatattcaggaaatcattcatcttttttaatttacttattaattctaatcaacaacttaagccgctggtgctgcgggttgtgcgctatttaaagtccacgtaatgttgctcgagaatgtatcaccagccgcaagttgaatacttggattggcacttaatgctaatttcccagcaacttgccatgttttcgacatcttatccgtcataatcggtgtttcagtaccattatcagataatcctacgttcgttggcaagccagtcatattaatggctgtgctgcttaattgtttgcctgtggttgatgccattttactcatcttcgctgtcaatttccaacctggcgttgctctggtatccgtgattttcaacccatcactgacctgatattgcttgtcctgagcagttgtaccaacataaatatcttttgataagacgttcccaaatctaaagctaggcacttgatccaatgacaacttaccaactgctggttgcgcttgtaattcagcttcgttagaaacaatcgtaactttttttgaacttccacttgattcttccgttacgttagtcgttaatgttagctgtgctcgataactctttccagccgtagttgcagctgcagcatctttcatgaaagtactatctttactaaaggttagtggttgttccgtatttaagttcgctaaatttgtaatgtcacccttaagattagaaacaccactattagtagcgggggttattgtcttatcctcaccatctgtaaattgccattcataatgccaattactcgttgaaccagatgccttagctaggtctgataaaccatcaactgaccaagtcccaccgagattcgccgctttcttgtaggctgctaacccaccaacataaaccgttttctctttagagacattctttgcagcaattttatatttagctggaatccctggtgtattcggatctttattcaattttccagtataatacgaatctggcttatacttttcaccctccacatcaatcgcttcgttaactttattcacttatttcgtgcgtttaatagtaaagtgattaagcagttggtgcagttggtgttgttgatgaaagattccaattaattgttgttgtgaaactctcatctttagctaaatcggctgctggatttgctgctaatgttaacgtagctgcttccatcttgaaattatcgacaccatgtttcccgttacctttaaccacttcaacggcaggagaatcgtccttaacagcacctgttaaagtttcaccaagtgaaccagtagaatctaaattcaatattgcgcctgttagtttattagcatcatctgtgaattgagccatgtcagctgtcaacgaccagtcagatttgcctaaacgtatatcagcaatttctaaagcgccagctgttttagcaactttaccagtaaagccagcataaatctcactagcttcaattgtcccaaagctgaaacttggtactgattttaatactaatgtcccattttcaggatctgttgggtttgttggatccttagcaacaacactaaagtcggcttttgatgtttgcggagcaactgcgtcagctgatactgaccccactgtcattgctgttggtgctaccattgttgctaatgctgaaaataattttgtcttcattgataattcctccaaattattattaattacatttaatatagtagcacgcaattcaattgccggataacaaaaaatagataccatacggtatctatttttacccttcactaattattcgttaaaccgattccaatcctgtcctagcagttatttccccattaccattcttctagtgtaaacagcttgcccggaatgcatgaccgcatcatccacgattgagactaagcgtgcttcacgggtaactgccggtgtccaattttcatcaattatctctaataaagactcgtcagtaacttcagccaggtaatcaagcgtcaattgcaatgcgtctgctaagtaaccaattaataatgctttatcgatgataatcactttggctgcttcttctggtgaatgcgaccaatcttgcgtttcatcaggtagatctaatgcaaatttttgtgaccaacctgcacgtatccacaatggttgtatccctttcaaatccgcaatctgataatccatttcacgggcagtatgccatactaaccaggtcaccgatttaattagtggctgcggcattgtattggcctcagccactgtcatttgttccaatgtatcgagtaatcgttcttgagcgcgttcgaccgttgcacttaatagttgcgttgcatgcatcttatcatcctccatatctaaaagttaaccccattgtatcattaaaccactactaggcctttttttatgaatttaccaaaccattacgaagctttacactttattttcactagaacaacaaacactttacattattgtttatgcttaaccttgtaaagaataaaaaatcgttttacaagaagcaatcaatatgcgcatgagccaaacaatcatcccttacgtggcaacaacaactttattacttttggcagccggctgtaccccacaaaaaaatactaaacaatcgacagctcatcaatccacccttgtccctaaacaaaacatgagtcgccacattcaattagccggtgcgattaatactcgtgatctaggtggaattgtcacgaaaacaggtgccagaattaaagccaatcggttaattcgttctggtgaattagctggtttaacaacgaaggataaacagaagttaaccgttggaaaacaattaaataacatcgttgatttacggactagtagcgaagttgcggctaaacccgatcccgctttaagcaacgtccactacaatcactatgatgtcaccaagtctttagggacttcggcaagtcaagctgactttttcaagaatctcgataaggttgatggtgaagctttcatgattgatattaaccaaaaattggttactgatcccgcagcacgcacgaactataaacagttctttaatgtcttattgaataataaaagtggtgcgacactttggcattgtacagccggtaaagatcgtgccggattcggtactatgttagtcctcagtgccctcggggttgatcaaaagagcatcatggacgactacctcgcctctaataaatatcgccgcgccgaaaatgaaaagacaattgaacaaattaaggtggcaactcacaataaccccaaagccgttaaaacgatcactgcaatgatggccgtccgtaaaccctatctacaggccgcatatgacacaatgaacaaagaatatggtggcgttaatggttatttgaaacacgggctgggtttgactaaggcggatctcaaccaattaaaaacgatgtatcttaccaagagttaatgcttcatcaggtagattcactattctcgtctctccatttttttggtatactgctccttagaatcaatcagttaaaggagcctcatcatgtcacctgctcaacatctcattttattattgatcgtgatcattgctgcaatcggcgtcttaagttcatcagtcatcttattcatcgcccaacaaaagaaaaatgaccaacttaagaagaaatcgaatgtgctcttttgggtcagcatcctcgtgatgatgatctttctgaaactaatcgatatgcttcaataaacaccaaaaagcatgccagtcaaatttgactagcatgctttttttgcaatctatcttctaaaaaaccacccttaattctttgctaagttacaaaacttggtctaagcaattttattgttccccacctttgaggatgttatcttaactactaaaggaggtgtcactatgaaaaccttagacaatatcgcgcttactttattaatcgttggtggtttgaactggctacttgtcggtctattcaaattcgacctagtcgctatgttatttggcggtcaagcagctattatttcgcgcatcgtatatgtccttgttggacttagcgcattatattgcattaagttatttgcacccatcaacagcgcgcagcatgaatagctttctggagcggctttttatagggaccaaacatcctgctcgtctcaatcgctatccattaacgtgttggtaaaactgttatttcttttcaataacgcaaaaaagcgtgctagtcagcctcgactagcacgcttttatttttttatttttcagattgaatttctgatactaaatttcgaaggaatttcacttcatcttgtccatcaaccgcatcttttttgttgtcgtcaacatcatctttttgttgacggtatcttgttgacgaatcgtttgagagcattgctttaatagctttttgcccatcaacatcaacgtaaacagtattgccttttgttgatgtaaattgacgtaaatcgattgacgcatctctttttatcttttgccatatagcctgctttgaaacgcccaattcatcagcaagttctctaatagttttaggcatgatttccaaacccctttcggagttcagcaagtgcttcttttcttgcttgatctcttatttttttatcgtgttccgcttgtttctcagccaccgcttgtttctcagttgagcctaaagttaaccccttaactttatcaatggcgcgccatttttgatgttctgttagttcactattatgctgaatattgaaaagcttttgtctttcatcttgaaattgcccttgtgagaagtcgtctgcgttctttttttctgatttccaggtaaatgagtaaccaataaccggcttgccacggcctttaccatatttttttctaatagttagacccctgaaaagaggagttagttcttctttaattggctgaataactctggattcaacgtttgcaggtttattccaatagctttgcggaatatcaagtaattcaaaaaaatcacttttagaaaaataagcataaccagtagttcgaaattgtttaaggagacgaaacatcgtttttgcataactactctttaaatctctgaactctgctaaagcatatcgaacccagctttcaagattatttagaagtttcaatgccttggggtaaatttgaatatcaacataagggacttctgccgaacccttgatttcaaatcgagtaaacatgacaaacatttctctatcaagtccatctttacttctagagccaaatctaagacctaatattttttgatatgtactttgtatgtcatcaataaatcgattatttgcggtcggcttatacgcgcttaattcttttaactgatcaaaagtaaaccgaacagtatcatcacctttatcgcgcattctagaaacaaccgaaaagaaaagattcatttctacaggagtaaatcttctcagaggaattgtattcagttctggatcatatttaactaattcattgctcataaaataacctccttgaataatactactttatttgaatacagaagtaaataagcgtagtcgataaacagacaaaatgtagtcgataaagtcctgtaacccttaggagagtaggactaaataggggtctaaaagaggtttaaaagaggtactactgtaccagagccaaacctcaaataaaaaacacaaaggagcgactcaaaaatcggctcacattaaattcaagtcactatgctcccacgctttgctcgtccgctaccattgacagcaaacagttagtttttctgaatcttaacaagaatctaactgctatattcgtttttaagggccttatttctcgtttctagcgattttgagactgtttatatatatttataccaaagcaaaaataaaaagccctcagcaggattttagagggctaaataacgaagccaggacgattaataatatcttcttgtcttttttgcaaaatataagtatccagggaatcatacagattccttttgatctcgccaggttcattgacaaaagcttcaaacaattcttgaatatcaacttgcccaggatcagcaagcatttcatcaattggctttaatactttcttttcgtccatctgagttactcctaacattagctaattatttcaggtttaaattaaaggcatctttttatagttagttattcaaagattgtgattaagtttagaaagaaaaacggtgtaaagcaattaaaaagatttgtttgagcgtagcgaaatctaatacaatttttggggtatcaaaacacgtcaaagttagttgacgtgtaagtgcgcattgaactaaaaaaaaccttttattttaatgatcaagttagctattttttagcgtcattaaacggaatgaaatgagtttaatgcgcacttacacatagaacatctatgtgagtccgcaaaccgagcaaggctcggtcaaggcgcacttacactccactaaaaattagtggaggttttgtgcttaaaatctgtctcagaagttgccttcggcaacaactaaaaatccaaataaaactaaccaaaatcaatttgatctaacatagtttcggtactggcttggtctaagcctaaataagctaaagtcatggcttcacttgaatgatttaataagtgcatgactaagccaatattgtaattggattgcgtataaacgcgataagccccagttttgcgcatagtgtgggtaccaaggtaattaatgcttaaaagatcgccgactttgctcatgattttatagaactgtttctccgtaatatgccgttctgggtgttgaatggacggaaagagccattcagattctagtttatgatcaagcagccattgacgatacaataaaagctctgtttgaactggtttaaggtacaaggtattaggcttgcctgtttttcggtcgtgaatgaatgcattttgtttaatggagccttccggattaaagatatctgcttgttttaggcacataacgtcactgactcttagtagcgtcgctttcccaacctgaaaaattgtatagttacgctgaccagctttgaaattattgagtaaggtatcttgcacctctttgagaacgtttgaatctttgatgggtaagacaacttgttgcatagttttagctccttaaaaaattgatttttagtacaaatttaggaacgatagataacaccccaattgggcgtatgattgtcagaactttgctatcggttgcggagatggagcgtgatatgattatcgagcgtacgcaagccggtaaaatatttgcaaggcaacacaatcccaactataaggagggtagacccaaaagaaaaaaagatagccggaatatggctatctttgaatattctaactctcatactgtgaaggaagccgctgaagctattaaattattgaaaggaatcagccttttaaaaagtcaacaaagaaattctgctttaaatcatattagggtatcacaaatactttacaaatatgttttgcgtcgcagcaaaaaccagcaaattagacttagtatagcagagataatcaatacggcaaaaacaccataagaagacttttcaaacgggacatggacattgattccccaaaagccaaaaataatcgctggaatagtcaaaacgattgatatctctgttagagttttcataatcatgtttagctgatacgaaatcatattgtctatcatatcttccaaatcatccaaatattggctgtaacctaaaataattctatccattgtgtcgcttgtatcgtatatctcatcaattatttttttggtggtaaaatcaatatcgttaatagttgtgaaatttttgttaatgaaatccagcgctttgtgattagcgccataggttgttgacaaagctatcatgtatttttgaagagtcaataaatcaccaaacgttggtctgagtggaccggacgttgatatttctgattctaaatcatcaatttttcccttgactccacgaaggtcgttaagcatcacatggaaatctttttgcatgatctttaaaagtacttcctgcatgaaattattgacatcacgtaaaaccatattggataagagttcgggaatgaattttaatttttgttttgtaaaaattatcaacttattcttaaataccaagaaaacaacagatgtcgtcagattatctagatgcccaccttcatgtacctcgggaaacaaaaaacttacgagcaaacttttttcatcgttctgatctatcatcgtgtcatatgcaactcggtcatcaaacgttagtatattgcctattttaaagtcatatttatgttcaaaagattcgatatattctcgttcgtcaccataaacatagacaacagaagagtttttgatatttgattctgacgaaactaataatgtatcttttgttaaagaataagttttcagcattgtaatcctcctgctttatatttttctcaaaaataaatgcgtaattgttgtgaaataaatacgttatcagttttaaaaacattttgtcttatgtatgataacctgccaaaaattttatctcacacattatctagacaatcttgtctccagcttctaatgtattatctaatttataattatagcccctaaattaaggaatgttttagtgaccacctaggatcatagttaactcatagcaaaactcctggtattttacttagaagtcaataaattaattggactgttttactgcggcactgtatggcgtttttttattaatgaacgtagttattcaaacttgtaactaattttttaatttcgtcacgaaccttacggaattcttgtagttgttcttctaaagttcctgtggcttgcgctgggtcagataaaggccagtgtaaactcttggtttgagggggaagcataggacatttatccttggcatcaccacataaagtaataactaaatctgaagtgttcaaataatttagatcaattaatttagagtagtggctactaatatctactccatcttcagccataactttaacagcatttagatttaacccatgagtttcaatccctgcactctcgatttgaaactcatttgccggcaatattttttttgcatatccttcagccatttgactgcgacaagaatttcctgtacataaaaaataaatttttttcattctaaactacctataattttaatttgtataacaccatgatacaccataaacttaaatgcaatgctttcatcaacataggtgtataagtattaaagaaaaaaagcgcggtagatttgtaaaaatctaccgcgcttttttggattaagcaaacattttcttagttgcgcgcatcaatgtcttgatgtcacgatcataacgtggtgtatcgactaacttggccattggaatgccagcgaagtgataagctgcaatttcgccagaacgaacagcactttgttcagtgaaaatcatctgataaggttgttcaacgaattcaccagtgaaggctaagttggttgaatgttcggggatgacttctggacgctcagttttggcacgattattaaagagtgctgaagcatatggcatatagacaggaatgttattgatgacactgtccataatttcagcttctttttcacgaatattgattgggccaggatcaacttttgatagttggccaattaattcttgaagcatttccttacccgtcatttcgatgtaaggtttatccacaaattcaccgttacgacgtgggtagaggaagtaaccccagataaccgcttcgtttggtttttgcgttgtgaagtgtggttgatggtgaacaacaatcgacatattcacatctttttgaccaagtggtgtgattggtttcgttgataggaacgaattcaaagcattcccaggaatttgcgttgtaatccgttcgatttcgtttaacaaaatatgattcttagtcgttaaagtgaagctgacccactcactggcattgcggtcagcgaagaatttatcgggattgccaagattatagaatttagaagcgacttgtttccacagaccggcagcagcaccataatccatgttttcagctgctggtgtattataatcgccaagtgttgcggaatcggtaattgacccgtttgtgaagatgaccgctgtgtcgtcgtccaccgtaacgtgttcaacttcatctgtctcagtattagtcattgtcataccagtaaccgtaatttcatcggtcatctgagtctctttaaagtctaagtcagtaatccgtcgattgaggataatgtgacaaccttgcgcttttaagtagttaatcagcggcagcatgatactttcgtactgattgtaacgtgtccggttaacaccgactaagtgttcaatctgagtgaattcataaatcatttggtgcatgtaacggcgtaattcttgtgcggaactttgggttctgaaagcaaaggtggtttcccacatgtaccagaagtttgtttggaacatatgtggatcgtccttgaagtattcggcaattgaaacgttgtctaatttttcttcttcagaatcgggcatcataatcaatttggtcattaataaccgatccttattattaaagccgagatgaccagcatccaaaatacctttactaccttctaataaacgtgctttgtcgaatgtgcggtgttgagcatcgaatgaacgggtatcttcttcagccgtcatattgggttcagttgctgaaggaatccgacctagaagatccattaaatcgacataagtccgatagttaagcatccgcccaccacgtgcaacgtagcccttagtattttcgagaggatggtttttattccaatattcatcggttgtttcggaaactgatgccccatcgtttgaaccatggtcatctaatgaatagaatgtaatcgcatcgccagaccaaccgccttcttgaattaaatagactgctgcggccatgttagaaaggccagcgccaatcataattgcttttttcttaatcatatgaaaaacctcctagattcagtttagaaatgacgagtgactaacggctttcgaatttttcgtaatccacagaatcgtctctaaaaagttccattttcttagctaataaacaagcaccggttgctgtaacacctacaaaaataaggctgcctaatagaaattttttcatgtttctcgcttccttccattaactacttttgatatctatattataccgcgaattcctaaaataggaagataaaacccttacataggaattatcagtggttatgatacgattattgatgggattaggccgctaaaaatcagaatagttaagtttagtttaaggctcttattagtcaggcataattcctagggaagcactaacggatttaaaaaaagtgataggcccccaaataatggttgacctcaagtcagcttgaggttgtaaagtagtcttattgattagaaaaaggagacttttaaatgcaaaaattatctgccttaacagccccaatgaccttaagcaacggtgttaccattccaggattagggtatgggacatatcaaacaccaaatgaagaaacgaaaaaagcggtcttagaagctttatcagttggctatcggcatattgatacagctgccgtttacggcaacgaacaaggtgttggtgccgctttgaaagaaagtgatatcgcgcgtgaagacatctttgtgacaagtaagctatggaatacagaacggggctatgatgctacgaaagctgcctttgcacaaacaattgcaacgttaggtgttgactatttagatttatatttaattcattggccagctaacactaaacaatttgaagccaaagatgctgaattaaatgctgaaacttggcgtgcaatggaagatctatataacgaagggaagatccgtgcaattggtgtgtcgaactttatgccccatcatttagatgcactcatgaaaaccgccgttatcaaaccaatggttgatcaaatcgaagtccatccgggctggccacaagcagaagctgtgcgttataatcaagcgcatgacatcttagtcgaagcttgggcaccacttggtgaagccagtgcgctttcgaatgaaacgattgcaacaattgcgacgaggcacggcaaaacggcagcgcaagtttgccttcgttggggggattcaacaaggtgtgttaccattacctaaatcaactcatcaagaacgaatggcgcaaaataccgatatcttcgattttgaattaacagatagtgaaatgacccaaattagtgctttggaaaacttaggcggtcaatgcatggtgccagatgacgttgatttttaagcaagtataaggaaggttaatatggcattatcaattggcgtagtcgcccaacaatatgatttgagtattccgacactacggtattatgaagaacaaggattattaccgtttattaaacgcagtccggctggtcggcgtgaattccggcaagctgatttagactgtttatgtgatattgaatgtttgaaaaaaaagggtatgcagttaaaagatattaagcaatacatcgattggcgaactgcaggtgatgaaactttggaccaacgcttggcgttgattcaacaacggcggcaaatgttggctaacgagattgaatcactgcaagtagaattgacgaagctagatcataaagaatggtattacacaaaggcacttgaagccggaacagaatccatttttacagctgactgtgatacagaatatgaacgtgcgcatcaataatcgaaaaaagaggcaacctgataggttgcctctttttgtgtgtttaaacggttaatgttttttgcataatcagatcacgttgtgcgtcgcttccgagttggaagatgtgatcaccaacttggctgaagccgaggtttttgtaaaagttaagtgcagcagtgttgtgttcccacacgccgagccatacgttagttttatggaattgttgcgccacggctagtgcatggttaattagttgtgttcccaaaccaagtcgcttaaaggactgtcgaatatagatacgttcaatctccagtgaatccggggcagctttttcagtttgtgcgccatcaatgttgagctttaaataaccagcgacttcgccatcttgataaataaaatagaagaacgaatcgggattctcgagctcgctagttaatcggtctgtattataagcttcttctaagtagttagcgagatcttctgctgcattttcagcgccaaaagttgctgtgaaagtttcacggctgatggattgtaagtcaggtagttggtttaatgtgacagcttgaattggcattgtgatgcctcctttgttgtaatagtgtcggacgtgtccctttttgacaaaatcccagtttgcggcaacgttggcactaactttgtttaggagtgcttcaagattatgggcctcgtcggtcgtcagtccagtcagtgccatttgatttgaataatcgttttcagctttgatggcgggatagacggctcgaccggcctcggtgagatagagatgtttgatcttatgattggttttgtcagggtgtcgttcaactaaaccatgcttaattaattgttgaacggcgcgcgtgactgttgcgcggtcgacttttaataattcacctagacgttcttgaatgatcccaggctgttctgcaatgcggactaagtaaaggtattgcccgcgggttaagtcatattgttggaattcaatattagcaatggattccaacgcgcgggctataaccccgattgggcggagaatttcagtcatgatggcatacctcatttcgataaaaatagtataaaatatttttgttgcatttacaacaaaaaataaagtttcgattcgttaagtacgccaaaaataagaatataattaattctcgatgtggaatatgcgctttcattttaaaattaatcttaaaaacagattaaggtgatttttttatgctcagttactaaataccattttgaaacgcgctcgtcgaagcaatgccttatgtttagctacatcagtcaaaccactgactgcatcagttattcgcctgcttaggctaatccgcacgcactacccgcttagtcgaccacttttcttaaacttgttgtttagttgggcgaattaagacttcactgaccactacatgttttggttggtcaatcgcatataagactgcgttggcaatgtcttctggattgagggccaacgctgattcttctggtgcatccattaattgcttaaccccttcgaaaacagcagggttgccaatcgtattcaccaattctgttttaacagcccctggtgaaacaattgttgaacgaatgccgttatctttttcttcttggcgtaagccttccataatagcgcgcactgcatatttagtcccgttataaacggcagaagctggataaaccacatgtccggcaaccgaatcagttgaaataatcaaaccatcttgttgggcttgcatcgttggtaagaccgcaccgatcccgtttaaaacgcccatgatgttgatatcaagcatcttttgccattgatcataatcgcgttcgctcaggtttccttgtggcatgacgccggcattgttgtataaaacatctacgcgaccgaaatgatcaagcgccaattggactaagctcgccatttgatcccgattagtcacatccgttgcttgataaatcgcatttgcaccgatttctgatgctaaagcttgtaaacgatcttcacgacgagctgctaaaacaaccttagcccctttgcttactaataatttggcagttgctgccccaatccttgatgaggcacctgtaatgatcacgactttattttgaattgacatgttaaaactccttttctaatttgatttgacgcatgactttcgctggcgttccggcaacaatcatattgtctggtacatctttggtgaccgtggcgttagcagcgacaatcgcattctcaccgaccgtcacccccggtaaaatcgttgcgccggcaccaatccatgcgttctgtttgatatgcactggtttaacgaataaaccgcgccggtcaggcttttaaagaagccctcaccaaccagaccaataaaaagccgccacgctaagcttgacggcttttttaacccacttgatttgcgaaattgcttaatttatgtccgttactttcccaaaataggggctctataatgcatattgaatcttatctggaggtcttttgatgatggaaaaaactgaaaaaatcgcaattttagaaaaactggtctcaattgatacaacagaccaagcagaaggtgtgattgccgactacttagccgatctattcgcacaacatggtatccatactgaaaaagtggcttctaaaccaggccgcgaaaacttagtggcctatctaggcgaagcaaccgacaaagtcctcggtgtcactggtcatatggacgtcgtcagcatcggtgacgcagcaaatggacgagtgatcccttcactctaaccgctcgcgatggtaaactcttcggtcgaggcgcaatcgacatgaagtctggtctggctgcgcttgtgattgcaatgatcgaattacacgatgaacatgttcctctaaacggccaaatcaaactactcgcaaccgtcgatgaagaaaagaacgaaactggtgcgcaaactttaaccgctcaaggctatgccgatgatttaacagccttattagttgccgaaccatctggcgttgataaacaagccttggcaaataaccccgataaattccccacagaaatggcccaaaaactccttgcggctaatcaaaccaatgaacaacatttcttaattttcgcccataacggttcccttgattttaaagtgacggcaactggtaaaaccgcgcacagttcaatgcccgcactcggtattaacgcaattgatcatttgcttgcctactacaatcggcaaaaacaatacttcgatcagaaacatcctattgatgatgtcctcggcgatatcgtgcctgtcacaaccttaatcaacggtggtgaacaaattaattcggtccccggtcacacagaacttacttgtcgggttcgtacaacccccgccttaactggcgaccaagtgattgctgacctcaataccatcattgcggaactcaatcaacaggtagacatgaatctggaattgaccgtcattaataaccaaccacccgttaagagcaatccacaagcaccattcattcaagctgttcaaaaaatcggggcacaaaagttatcccaagcttatccactgatgcacgttgctggcggtaccgacgccgcccaccttgctaagcacaatcctgacttacctgtggcagttgtcggccccggcaatgatactagccacatgattgacgaatatgttgatgaagaaatgtacctcaaacacatcgacttctttaaagccgttatgctggattacttaaaataacaacacaaaaaaacatcacctaatatatgccctacttaagagcttatcggatgatgttattatttaatcgtgatacgccttcaagctatttttaagctaaggcagtattgatttcttgtgctaatgtttctttccgttgtaacccaaccatttgttgcactaattggccatctttcatgaccaacaaggttggaattgattggatgccgaattcagccgccaagttttggttgtgatcaacgtcaactttggcgattttagctttacccgcgtaatcgtcggctagttcttcgacaattgggccttgcatccgacatggtgggcaccatgttgcccagaaatcgactaatgtgaccccttcttgaacttcatctttaaagtttgcttcagttagaatttgtgttgccattgcgatcacctttcttttcaagaaaatcattcaacgatttcattgaattactcataatataccaccattgggacgtgccgtcaaaaaggacgcttcatcttattccgtttcggtcataactcgcgaccattcccacactgattgattaaacgttgccactttaaacccagcagcttgtagttgttgactggcaacattggcgtaagcacatagacgaccacgacaataaaccaccacttctttatccttggggagctcagctaatcgttgatccaactgatcatatggcacattgcgtgcccctggtaagtgttgacttgcaaactcatctgcgggacgcaaatcaatcaaacacacatcgtctgccattaatttcgttttcaatgcgtcaccagttaacgcttcgggggcacctgtttcttgcgcgagtgttttttccaaaatcgtcatctctggcaaagtttcttcgcagacatcaaccaagagggttaccaattgtttgacccgttctgaatttaaacgataagtaacaaaattcttctcgcgttcaatcgccactaagtttgtttgtttcaaaatttgcaggttccgtgaaacggtagcgacacttaagccgactgtactggctaagacttccaccgttttggggccttgcgcaagaatgttcaacagttgtagacgcgtcacgttccctaacgacttcccgactttgaccacctgctcataaaccgcatcccggtattctgtaatgcgttcatccactttcatcgcctcccaacaatcaacgcctttattgaatagaatcaatttaacatttctagacaagtgggtcaactaaacaagctaggcaattaaagtaagacacctcagttaattgctttcttcaaatcaacggtgccctgattagcttctttatctgtaatttcaaaaattagtataaattgccactcttgaccgactttatcagttacgttcatttcagtatatttccctatctgaattcctaattaaatgaactaatgtctaaaataaaaaaagaaccaccactcaagctatgtactagggtcctgtcaagttgccggatgaaataatataaaatatccaaaaaaataaccgtctaaactttgacgagtcacggttattttttaccaaaaacttgccaccgtcttaagcggactgtggagaagagtcgtgttgtcgcacggctctttttctatgctttcattataacaccgacttttaaaatttgcactagtcgtcaattcaaacaagcaaaaaagcccccgctaaatcaggcttggcgggggctttttcattgattatttatcttcagtgacttcttcttgaacagtttcaacagcggcggctgcttcgtctttggcttggccaaatgcactcttgccgtcgatcacgatatcgtcgaaatcttcttggctagcttcaaggctgccgccaaattgtgatttcaagtctgctgttttttcatcaaattgtgcttttgcttgttctttgatatcagacgcattgtcttgccaatcacttgcataatcatggacgcgattcatgtgtagctttgcgtcgtcttttaagtctgctgctgtttcacttgctaaatagtagtagtcttgtgcgcgatccattaaatcatcacctaagtccactaattttgattgtaattccttacccgtcttaggagttaacattaatgttgcaccaatggctgctgcgccaccgactaatacacctaatagaaaatgtcctttttttgccatgagaattactccttatcctttgtttgacgtcgattttggtaaaatcttaatgcacttgcgccaaccttcgaagcgaccgttgccttagcggttgtccgcccaacgttggtaacatgttccgttaaattgcgacttgccgtattcaaacttgaaacgctctcgccaagttcgccagccgctctgaaaacaggatccaagtcagcgactttcccgttcacatcgtctagcaatacgttggctttgctgagtaaaccttctacttctttagataaaatatcaacattctcagtaacaaccgtgacactcttgttggcttccgttactgttttagaaacatccgttaatacttttgtgacttttaatagcatcactattagaaaaacaactaggaccgcaaaagcccctgcggcgattagcgccgcaatttgaccacccgtcattgatttgttcctcctacttcgttatctattacattgtctcttaaagactagaatagcattatttcccttaaccttcaattatcttcactatattaggtgccattttttctgacatttgctaaactaaagacatgctacaaaaaaggagtttcacgcatgttcacacgtttattagcggccgcaccaactccggtcgaatctgttcagaaacagaccaatatttttatgcgctacatcacttcaattgactgggataaattactcagcaccctcgttgctggattgtttcaaattatcctactctccgctttattctacctcatcaatcgcttaggtaaatacatcattaagcgtagcttcagaaaataccgcaaaactgatggtttctcaagtaaccgcatgaacaccatttatactttgatggtcaacgctttttcatacctcgtgattttcttctatctctatgcgctactcagcgttctcggcgttcctgttggtaccttgattgccggcgctgggatcttcagtttagccattgggttaggcgcacaaggtttcgtcaacgacatcgttaccggttttttcatcctcgcagaacaacaattcgatgtgggtgatatggttaaaattggtacggtagaaggcaccgtcaacgcgattggcttacgaaccacacaagttcaaagttacgatggcaccttaaatttcattcctaaccgcaatatctcgatcgtcagcaacctatcccgcaatgatatgcgtgttctgattaacattcgcatcttacccgacaccgacttacaactgttagcggcaaccgtcaatgaagtcaatgtgcaactggtgcccaaacatcctgaaatacaagatggccctacgattctcggggtaaccaccctcgcagatggtgtccttgcttaccagattgttatgcacaccactaacggcgaacaagctgccactaaccgtactttcttacaggcttacttgcaagccttgaatgaagctggtgtcccattaccttcaacacccgttacaattcccaccaaataaaagtcccctcatataaaaaggagaaccgcttatgccacttattaacgcactcaaaggcgccctaatcggcgtcgcactcgtaatacctggtctatccggcagcattttcgccgttatcgttggtctatacgaaccgcttctggcggctatcgcgcaattcaaaaaagattggcgccaagcaattggctttttatggccaatcgggattggcgctgggatcggcgtcttactctccaccaaaatcattctttggttatgcaccgcttatccactagcggcatacagtttcttcatcggtcttgtcgtcggcagtctcccattcatctggcgtagactcgccggactcaactggcaaaaagtgttaatcgccatcgtctgtggcgcaattatgctactactcacccagattggtggtcaccaatctgaatccgacatcgctatcaaacaactcactaccctccaagactttggcacgttactatttgccggcttcttctcagtatcactcatgctcatcccaggcgtctctgggtcaatcatgctcatgattgtgaagcaatatggcactgtttatcacgctgtcagtcaactactcgacttaatggtctacctcgtcacaggacgcttgacacaagccacagaagcgttcaaaagcgtcgcgctcctcttaccgttcatcattggggccgtcatcggaactgtgattgttgctaaattaatgcactacctattagcacacttcgtcgaatacgtttacgccggtgtgctcggcgttgtcattgccgccatctggattcttgcccaaaccggcgtcgcaccagcctggccagccctaacaaccgccacagcactactaggacccatcgcactcatcatcgctatgatcatcctaggcacaatcgcaacaatctacttcgacaaagcatagagtgctgttaaagcgatttgcctctgagcattaattaaaaatgagcctcaatctcgtcttttgagattaaggctcattttagattaagcggaaggtgttgcaattaaaaagcacgtttccacaaaaaaactatccacacccttcccaatcaggttgtggatagtttttatttattatagtgctttaatcgctctaagatgttcaatggattgaagtcaatatttgagacagattttaagagacattcagaaccgcgtttaccttccacagctcaaataaatcattaatcgcgataataacttatttgaaccctggaaagcattaaatcaggcggccatttggctcgtaagtgttgcaatttcaacttgtaagggggtctggtagcccagtgaactatgaattctcttcctattgtagaaagcatgcacatattcaaaaaggacggcaaaggtgatttttttaattaagtgcaaccaagctgataatcaaaatatgaaatggatgacaacagcttttttaggctaaaagtcgtataatgacagtattctaaatgaaattggagatcataatatggcagaattgatgcgtttttatcaaagctttcaaccggaacattatcaagtttttctagatattaatcgggctcaaaaacaatttagtggtcggacgacaattacggggactgctaaagaagcacttgttttaattcatcagaacggtttagtgattgaaacagtgacggctgcaggtaagagtgtgccgtttacagttgataatgacgcaaatgccttgaaagtcgaagtcggccaacctggcgaagtgactttggtaattgcctatactgccgctttaacggattcaatgatgggcatctatccttcttattatcaagtcgatggggtgcaaaaagaattaatcggcacgcaatttgaaaccaattttgcgcggcaagctttcccatgtattgatgaaccagaagccaaagcgacttttgatttagcggttaaattcgatgagcacgaaggcgaaacgattctgagcaacatgcctgaaaaagaagtcatcgatggcgttcaccactttgaaacaacggtccggatgtcaacgtaccttgtggcctttgcttttggtgaattgcaaggggttcaaactaaaacggagagcggcgtgcaagttggcgtctttgctactaaggcacatcaagcaaacgaactcgattttgcattggacattgctaaacggtcaatcgaattctttgaagacttctaccaaacaccctatccattaccccattcatggcagttggcattgccagacttttcggccggcgcgatggaaaactggggcttagtcacttatcgggaagcttatttattactcgatcctgataatactgccttggatacgaaacaccgcgttgcgactgtgattgcgcatgaattagcacaccaatggtttggtgatttagtaacgatgcaatggtgggacgatctttggttgaacgaaagttttgccaatatgatggaatacgtcgcaatcgatgcgttgcagccggactggcatatttgggaaagtttccaaacctcggaagcagcggcagccttacaacgtgacgcgactgatggggtccaatcggtgcatgtgcaagtcaataatccagccgaaatcgatgcgttatttgatggcgcaatcgtgtatgccaaaggcgcccggatgctcgtgatggttcgcgctttaatcggtgacgatgctctacgcgctggtttgaaagcttattttgcagcacatcaattcggaaatgcgactggcgctgacttgtgggcagcactggggaaagccgctaacttagatgttggggccattatgcgttcatggctcgaacaaccaggttatccagtggtaacggccaaagtcgttgacggacaattaacgcttaaccaacaacaattctttatcggtgagggtcaagaagttgggcgtcaatggcagattccattgaagagcaactatgcggcagccccattattgatgattgaccgtgaattggtactcggtgattatgctcaattacgcgccgacaatgggcaaccattccgcttaaacgtggggaacgaatcgcatttcattgttcattacgatcaaacattattagatgatattttaaatagtagtgctgacatggcaccaattggacaactgcaactactgcaagacttacgcttattagctgaaggacgtcaaatttcgtacgcagatgttgtgcctgttttagcaccttttgccaagagtgattcaaatgtcgtggcagatgccctttacacggttgctggcaacttgaagaagttcgttacaccaggagaagaaagtgaacaacacctgcgtcgattctttgaccaattgagtaaagcgcaagttgcgcgcttaggttggatggttcaaccgactgatagcaatgacgatcagttaatgcgcccaactgttttaagcgcagccttatacgctaaaaaccaagcagccattgatgcagcccatactttattccaagcgaaccaagaaaaattgatcaccttaccagccgcaattcgggtactggtcttgatgaatgaggtccaaaacttcgggaatgccgcgctttatgaccagctcttagcagcttatcgccaaacgagtgatgcgagctataagaatgatttgactgcggccttaacgcgcacgactgatcctgaattaattgcgaccttaattggaaaatttgaagatgccagcaccatcaaaccacaagatttgcgggcttggttccgcggcttactcgccaacgacaagagccaacaagcaacctgggattggattcgcaacgattggcaatggctagaagagacagtcggcggtgatatggaatttacaacgtatatcacctcgattgccgcaatctttaagaccccagaacggttggcagagttcaaagccttctttgaacctaagctcaacaccccaggcttaacccgggaaattacgatggacattaaagtcatcgaaagtcgggttgcattgattgaagatcaaaaagcagcggttaatgaaacaattgccaaacatatgtagtcgaacgttgtgcaagttaaattcaatttgaggggttttgagatgacgattaaattagtcgcgattgatattgatgatacattattgagttcacagcaccaactgctagccagtacgaaacaacaagttgctaaggccctggaacagggtgtgaaagtcgttttgtgttccggacgcccattagctggcgtggtgccctttttaaatcaactagggattgccggtgataatcaatacgtgattacgtttaacggcagtattatcgaaacggcgtctggtaaaatcttgaaagaagctggcatcagccgagaaacctaccaagcgattgacgactactcgcaagcaacgggcttaccgtataatgtgctcgatcaaaatagtgtggtttatacgagtaatgtgaatgttgcaccaatgacggtggtgcaagcttgggaaaacgaagctggtattcatattcgcaaaccgaatgaaatcgacgcggccacgcagatggtcaaagcggtctttacaggggccagcgaacagttagatgcacatgaaccacaggtacgcgcgcaatttggaactgataattatgttgttcgtgcggctgacctctttttagaagtgatgcacgctgatgttaataaaggcaaagcagtgcaatacctcgcgaataaacttggattcgcgccggatgaaatcatggcgattggcgatgagaaaaatgacatcccaatgttccaatttgccggtactgcggtgacaatgggcaacggttcagctgaagcataagcatggcagtaataggtcttaataccatattgtgataaactttgttctttgaaaactggataataagtaatatattagttttaaaagccgagaaaacattgcgttttaaagagttttttaatagaaatatgaattagttcatatcgctaaactcaaataataaccctttaccgtaggtaaagttaggttaagttataaagggcgcacggtggatgccttggcactaggagccgatgaaggacggtactaacaccgatatgcttcggggagctgtaagtaagctttgatccggagatttccgaatgggggaacccaatacctttagtcgggtattatcattaagtgaatacatagcttaatgaaggtagacgcggggaactgaaacatctaagtacctgcaggaagagaaagaaaaatcgattccctaagtagcggcgagcgaacggggaagagcccaaaccaagaagcttgcttcttggggttgtaggacagaacattggagttaccaagttaagttgtaatcgaatcagctgggaagctgagtcaaagagtgtgataaccacgtagattaaacaacttaacctccgttctggatcctgagtacggcggaacacgtgaaattccgtcggaatccgggaggaccatctcccaaggctaaatactccctagtgaccgatagtgaaccagtaccgtgagggaaaggtgaaaagcaccccggaaggggagtgaaatagatcctgaaaccgtgtgcctacaattagtcaaagctcgttaatgagtgatggcgtgccttttgtagaatgaaccggcgagttacgtttatatgcgaggttaaagtgaaaagctggagccgtagcgaaagcgagtctgaaatgggcgagtgagtatatagatgtagacccgaaaccaagtgacctacccatgtccaggttgaaggtgtggtaaaacacactggaggaccgaacccacgtcagttgaaaatggcggggatgaggtgtgggtagcggtgaaattccaatcgaacttggagatagctggttctctccgaaatagctttagggctagcctcggaatattggatcatggaggtagagcactgtttggactaggggcccgtcatgggttactgaattcagataaactccgaataccattgatttagttccgggagtcagactgcgagtgataagatccgtagtcgaaagggaaacagcccagatcaccagttaaggtcccaaaatttatgttaagtggaaaaggatgtggcggtgcacagacaactaggatgttggctcagaagcagccaccatttaaagagtgcgtaatagctcactagtcgagtgccgctgcgccgaaaatgtaccggggctaaacataataccgaaactgtgggtggacacgtaagtgtccgcggtaggagagcgttctaagggcgatgaagctagatcgtaaggactagtggagcgcttagaagtgagaatgccggcatgagtagcgaaagatcagtgagaatctgatccaccgtatgactaaggtttcctggggaaggctcgtcctcccagggttagtcgggacctaaggcgaggccgaaaggcgtagtcgatggccaacaggttgagattcctgtactagtttattttgtttgaacgatggagggacgcaggaagctaaggaatgcacacgactggaaatgtgtgtctaagcaacaagtcttgagttgagtgaaatgcttgattctttaaggacaagttgtgatggggagcgaaattaagtagcgaagttcctgatgttacactgccaagaaaagcttctagtgagaaataaactacccgtaccgtaaaccgacacaggtggtcgaggagaatatcctaaggtgagcgagtgaactctcgttaaggaactcggcaaaatgaccccgtaacttcgggagaaggggtgctgaccgtcaggtcagccgcagtgaataggcccaaacaactgtttatcaaaaacacaggtctctgcaaaatcgaaagatgacgtataggggctgacgcctgcccggtgctggaaggttaagaggatgagttagcgtaagcgaagcccagaattgaagccccagtaaacggcggccgtaactataacggtcctaaggtagcgaaattccttgtcgggtaagttccgacccgcacgaaaggcgtaatgatttgggcactgtctcaacgagagactcggtgaaattataatacccgtgaagatgcgggttacccgcgacaggacggaaagaccccatggagctttactgtagcttgatattgagtgtttgtacagtttgtacaggataggtaggagccgtagaaatcggaacgctagtttcgatggaggcgttggtgggatactaccctaactgtatgaccactctaacccgcgccacttagcgtggcgggagacagtgtcaggtgggcagtttgactggggcggtcgcctcctaaagtgtaacggaggcgctcaaaggttctctcagaatggttggaaatcattcgtagagtgtaaaggtataagagagcttgactgtgagattgacaaatcgagcagggacgaaagtcggacttagtgatccggtggttccgtatggaagggccatcgctcaacggataaaagctaccctggggataacaggcttatctcccccaagagtccacatcgacggggaggtttggcacctcgatgtcggctcatcgcatcctggggctgtagtcggtcccaagggttgggctgttcgcccattaaagcggtacgcgagctgggttcagaacgtcgtgagacagttcggtccctatccgtcgcgggcgcaggaaatttgagaggagctgtccttagtacgagaggaccgggatggacatacctctggtgtaccagttgtgccgccaggcgcatcgctgggtagctatgtatggacgggataaacgctgaaagcatctaagtgtgaagcccccctcgagatgagatttcccattcctttatggaagtaagacccctgaaagatgatcaggtagataggctaggagtggaagtacagcgatgtatggagcggactagtactaatcggtcgaggacttaaccaaaggtgcaatgttaggcttttgaaatgaaatattacttattatgcagttttgagagaacgaagttcttctcagtgcgcaagcacaaaatagtgtggtggcgatagcaagaaggatacacctgttcccatgtcgaacacagaagttaagcttcttagcgccgatagtagttggtgggaaactacctgcgaggataggacgttgccgcgcatttattaaaagatagtggactattaatggcaatattggggtatcatgttaattgttatattaaagaaagcccgagggggatatatatatatcatgagtaaaaatagaaaatctattttgagtgtaatgttattaataataatattattagctattcttgtaggattgtctgcctacgaggggctatatccgtttggtaataagttatggatacgagcagatagttatacgcagtatagtatcttttacaaatacttaagacagcaactagtacataacggaacacttctttatagttttaaattgggattaggaggcagtttctttacaataatgggttattacttaatgagcccactaagttttctcgttgtcctttttaaggatagtcaaattatgctttttatgacaattctaatcatatctaaaatcgttctttcaggtattacattttatttgtttatcaataaaagaataaaattagactatgtttatcgcttaggattgtccatagcgtatgctttgatgtcatttaatattatttatgcatttaatgtaatgtggcttgatagcataatattaataccaattgcgttaatgggtgttgatcatttgatcaataaaggtaagatatggctactaacaggcactttaacactgttattcatatctaatttctatatggcatatatggcaggtatcggtatttttatatatttcttagtagaattaatagtccttcaaaatagagtgaaatggaaatctggcattaagtttctaatttcggtaatacttagttttgggttatcagcgtggctaattttaccaattaattatgcattgaaatcgggacccaaaatacccttgcaagttggattcttgcaacgcaagcagagtatctggatagcattgtctgatctgtttagccataatacgcaattatttgatggcgctaatatatattgcggtatcctgatgttagttgctgtaatagctttttattttatacccaaaataaaaataagaataaaagtgatagtgagcgctttagagatttgtttcttaattagttatatttatgaatatccatatgtaatgtggcacggatttcaacaacccacagggtatggattcagatttagttttttaatcagtttaatgatgatattaatcactggttttgtgattaatatcggcttagaaaatgtactaaaaccattggtatatgcggtgctattatgcagcataatattgttaacgttgtataaaaagcaggtaatagataacgggatactaattatcaatagtgtaatgttagggttgcttactttaatgatattgattggctatattttctataaaaatataggaataaatataatcaagtggttaacgttagcccttattatgacagatagtattcaaaatatgcattttgttattagtcagttggatagcttacccggatacgtcgctaccgaaaaaaattggaaagaaaatgacagtcaaaatttaaagactgctttatcttatttaaagcaggaccgaacattctatcgaactgtagtaacgccaaatgcaatgctaaaccaaggaatgtacaataattttaacgggtttagttggtttaacacttttggatatcagcaattagctacaacgttatctcaatttggatatagtactactttggggaataaatcactggcatatcaagaaggaaatacgattgtggatagtttattagggctaaaatatagaatagcattgatgaatgattctatgacttctattggataccagaaggtgttcaatagtggaaactatgaagtgtatcagaataaaaatgctttaccgatcgcaattattaatgacaatctaaccattaatcaaccactcgaaggaaatgaactacagcggcagcttctcttttttaataaaaataaaagaagtgcaatcattcgaacaatagataatccaaattttactgttcataacgtaaaaataaagcaaaaaaataatggcattcagttgagcccatatggtaagaatgcttatattgagtatcggattgatatgccagctaattcagaacttctgactaagatagctgtaattgatggtgttaattcttatggtaaattagattttaaaactaaccagattatacgaaataattatcctaattttcataatgaaggtgtattgagtctttataagagttccaatcacaaaagtaatgcatttgttaaaatgcgcttaaaaggaaatgtaaatatcgcagaatctcctaaatttatactacttaatggagatgccctaacggagaatattgaaaagttacgaaaagaagctccaaaggttataaaaaagagtgagaatagtattgaattacaagtgaatgctaaacataaagagcctgtctttttttcgattccgtttgataaaagttggaaagcaactgtgaacgggaaatccgtgttacttgaggataatcatggatttatgcaagtaccagttgaatcaggaaagagcagtataaaactaagatatattccaaaaggtattaaagaaggtttcttaataacaagcgtgacagctttaatgttgatcctttttggaattaaacagcaactagaaaaaagagttagtagggaataggtaatgaacacagagagcagaataagattaaaatggattgatcgaaaaagactaagagagattatggctcttttaggaattagtatattggtagtagaaatataaacgattaatcattattaagaaggtggagcagatgaaagacgccccaagacatacaatcatattagggatagtggccacggtcattgcgtttatttgtggcatgttagttttaaagacgattttgaatttcaatttatggcttgcgattctaatcagtgcagtactaggcttatatgtcgggtttaatgcattctatagtacgtatttagcagaaatgatcaaaattgaagtggctaatcaaggattaacaagccaagacttagcgacaatgatgcatggtagggctaaggattatccaattgtccgcggtgaattgcgtctaatcatttctcggcgcaaacgcgcacagctgttagcgaagttgcgtgcacgggttagctaaggcttttgcatgaacgattgttctatgttaggataggactaacttattgaagggtgcgattacatgttaattgaacgaccattaattatgaagcttcgctctgtatatttgaagatgacgcatcgtgcagagcctaatattgattaaaagtcatctataggacattactggatttaacgactggtgacagtggtttatttgggtagtgactatggatggagtggtcgatagtcaatgattgtaatcatgacaggggtagcggatgctgcccctgttttttatttggaaagaaagtaggaataaaacaatgagtattttaaaagtcgaaggcctaacacaacagtttttagataaacaactttatgacgacgccgggtttcaagtgaataaaggcgaacatatggggattaccggccaaaacggggtgggtaagagtacgttaatcaatatcctcacgggcgtcattcttccggatgaaggaaaagtgacgtggcaaaagaatttgaagattggttatctcgatcagtatgcgaagttagcaccaggattatcgatctttgaatttttgaagacggcttttgcggatttatataagaaagaaaaattaatgagtcaatattatgcggactatgcagagagccttgatgaccaattgctcgaaaaagcgggtgcgattcaagaactattagaggcaaaaagcttctatgatattgatacacgcgttatgcaagtcgccactggcttggggattgatgcattagggatggatcatgatgtatcacaactaagtggggggcaacgttcgaagattattttagcgaaactactattagaagaacccgatatgttattactggatgaaccaacgaactatttggacacgaaccacattgattggctgagtgattatctcaatcatttcgaaggcgcctttatcacaatctcccatgattatgactttttggaacgggtgacaacctgtatcgccgatatcgaattcggtaagattacgaagtataccggcacactacaacaagccttccggcaaaaggaagagaataaggctagttatttaaaggcctatgagaaccaacaaaagaagattgaaaaaacgaaagcttatatccgcaagtataaagcgggctcccgttcgacaattgccaagagtcgtgagaaacaattggcacatatggatattttgacgccaccaagtaatcgcgtgaaggctaacttccgctttccatatcatgcaacggccagtcagattctattgacgactaatgatttggagattggttacgatcgcgcgttactaccagcgttgaacttttcaattggtcgtgatcagaaggtggtcttgaaaggttttaatgggattgggaaatcaacgttgattaaaacgatcattaaagaaattccagcaatcgatggggactttgagattgccagtacggtgaagtttggttactttaaacaagacttgaagtggccgaataatatggtaacgccattacagtatctacaaggcgaataccctgatcagaaacaaaaggaactacgccaagttttatcgcggactggtttaactgccgaagaagcgatgaagcctttgaaacaacttagtggtggcgaacaatcgaaggtgaagattgccgaactactattaacatcaagcaactttcttctattagatgaaccaacgaaccatttagatgatgatacgaagaatgcactacgaaaagcaatccaagccttcgagggtggcgtactccttgttactcatgaagaagacttctatcaaggtgactggattgataagattttggatgttgaatcactcattaaacaatagggataccgtagagctttgaagggttattggtaacgatgaaacgttgctggtaacttttcaaagcttttttaataaaaagcttgaccgcgcctgttaatcttggtaatatataaaagttgtctcgacgagggacgtatggttgatgactcagcgatacgaaataaaaaagattttaaaaaacgcttgttatttaaaccttatcgtgataatatattatatgttgcttacggagctataacttctaagtaataattaattaaaaatagttgttgacagacgataagttgtgtgatataattaaaaagctgtttcaatacagtagatctttgaaaactgaacaaagtttcgacaaaccaaatgtgtgtttgataaacaattgcattggattatagcgcaccaatttctgccaaatataaaaattgaagaatagtaaaatcacggtcatcaaaacattcacttgaataatattgatgacggataaattaccgtatcgtgcaaaagaagtgtataacacccaaaaaccagccgttgttaaaatagcagcgtacatcactaaacgttgcttaaacaaccgtcgcttatgcataataaccccaatcacgcgttggcggtttttcatatttcgctcacgaacaatcatgtcatcgacaattgcttgatcttttttagaaagcatcttcttcctcctcaaaataatcaaatctttgccgtacttcataggtgcccacatccgtgtaatctggaatgataatctgtggttgttcgtgccgcatgtctaatggaccatacttttgtaagtacatatcctctgctagatcgatgcgctgtctcaatcgcgtcggatcatacatccgcagcaaaccttttttcaaacgatattttcgtaatttattcaatagaaaaagccctaaaaagaagactgcaaatacggcaacgtataataaaaagtaataattagtctgtaataatatccttctaaaggccattaagtcaactggtagcggaacacttttgacagtatataagacccccgtaatggtcatcggtaccagacacattaaccatccaatggcaatcagaatcccctgccagatttttttgcccgtctttttcttagtaaaaaaccaatcattcgtcaacgatgcctcactcacttgatgcgtgatatagtctggtttagtcatcttgattgccctcctcttttgtcttagcgacgacctctaccgaacgttttggtgacttccaaacgccagcatcctcgcctttaagaatctgaataatcgttggtccgatttcaaccgccacggtgaaagtattcaccatccaatagattaggatataccatggcgcaaacgcaatatactttaatgatcgtccacggtcattaaagtaagacgccataatcaactgaattaagcccaccacaatctcaattgaaataaaaatcgctgcaaagcagaaattggtaattagacgtgaccaatccccttggaccaagcacaacacctgaacaccaacaaacgcaatcatacttaaccagaaaaatagcgaccaaataacacttaaactgtaatcaacaataatgggtaccattgccaaatgtttaatcgggtgtctaaagacatccatcgatttcgttaacaacacatgaatcccaccggcagtccaccgtctccgttgtttgaccaactcaggcagtgtttcaggcacatccataaaaaagcgaatatgtggtgcgaaatacgcttgccaaccatgcacctgcatatcccaagaaatagcgatatcctcagttggttgttccgcttgccaacccccaacatctaagaccgccgccttacgatacatggtattagcaccagaaaatgcaaatagaccaccgtatgaaagctgcgaacgtttaatcagtccgatgatcgagttcaattcattttgttgtgcttcagctaccaacgatgttttgttgattaataacatattgccagtaatggcccctaatcgatcgccaccttctcgttcgaaatagtgcatgtatttccacaatgcatccacttccggtttagaatcggcatcattcgataataaaaattggccttttgaaaatccgagtgcaatattaaacccagcggctttcccacgattattaatgatcgtaatcacacgtaagcgcttctcaccataccgagtctgcaatcgattcaaaatagcacctgtttgatcggttgaaccatcgttgaccacaatcacttcatactgattggttggataattcattcactcttcaaggtgttcaattgtcgattcaatcgaagcttcttcattatgcgcaggcactaaaatagtaatgaatggcgtccctttttctaagtaacgtggcatatctttgcgttctaaaaataaccagtaataaagactggaaacaatgaaagataatcccccgacgattggatacgacacaattgtgtagatgagtatccttgttatgtaatctgaaaaagccatgtagtcttcacccagtccttattgttgttcgattttaatagacgccaacttcatcacggacaatcaattgctctgcaaccaatacaataacacatcaggttcacattattaaatatatttatttgaaattttatcaatttgtagcatagtggtagcttaatctgaaacgttatacactggcaaattaagttatttatagcccgtagaattaagtcgttttgaaaagatggagacgttacaatctaccaattaaataaatctacaattgaattttatttaccttatgaagatgttcaaaacgcgttaaaggaaagtgcgcaaaacccctttatacgtacaaaggatgaatgggtagtgggtaacaatgagtgtaaattaaataaggcacaaaaaaggatgcttaaggataaagaaatatataatcatttcaatttagaaaatattcccagttccatcaaaacggagctaaacaagatagtgcatgacatcgatgactaatactttaacaccaaacagaaaggggctatgaatatatagggtctataactatcaaatagtccatttttttagtataagagcagtaaaaccagacgtggaaaccacgtggtcttttagttgattcagtaaaagaagccgaagccaaagtgaagacgttggtttcggcttctttggcttttaattgcgggaacgcacacaaagagccaaaaaagattactgacagccatcttctgatggctgccagtaatcttttttaagttcttgttcaaaaggtttgataaaatcaaagctagaaactagctccggtcatgcttgttgcgatcattatcgcgtaagtcttctacgtgggcatcaccactcgtatcgatatctagttcttcgcggccgacgttttcacttacttgtttcatatcttcgcgttcttgtttacgaatgtcaacttcttctcgaacgaccgggcgtttgttgacatcgatctgttcttctttgattgggatcgtgatcgtgtcgtcttctagcgtatcattgacatcggtagttgcagccgcaccatctccgggctttctttcgatcacgatttcttctcgtttaaccggtacgtcgactgttttcgtctcattgacaacatttttatggatatcgactttacccgtcgtcacatcatgcttattgatatccaattgttcttctttaagctggatactatcagtatcagtatctagatcagttgcacgtgcagcatctgatgcatgtaaattatttgtgctagtgtcaccagctgcatgtctgcctgtaacattttcagttgcttgtgttgggtcgtttttataattattgacggtgataataatttttccagctgagatatcatctctatattggtaaagcgggtcgttgtttgcatggtcagcttcttcatttaaacttgaatcgtattcgtacgtatcagcagaaaatgcatctttgattttttcccatagtgagcgatcttcgtgagtcgtttcgacgccatttacgccggttttaacatcgattcctgacagtccagcaaaaccaaaatttgtagctgcatctttgttggtgtaaataatgatatcatcacggctatagccttctctttgcagttgttcgatcacggataaagcttcttctctcgtactgtaacttccaataactgttaaatttctttccaacatataaatccctcccatttcaactatttttttaaatacgcttacaattgcagtataacgaattcagcaaaaactttaaaagaaacagctcaagaacaattaatcgtcaaagctgatgatccagtgaatctttaaaatcttgtgaataacgaattgacataaaaatactcctatactttcattttacggactgaataaaaatagtccatttttttagtataagagcatttatcattgattgcaccattaggattgacgacattgattatgcaagatggtgttttccatattagtgaaggatcaccaattattgcatttttgccagtcattatgattggaattgtcttcggtctggcgatggattacgaagtgttcatggtctcacggattagggagacatacattgccactggagatacaaatcgggctgttaaaacaggattgcaagagagtggtccagtcattattacagccgctttgattatgattgctgtctttggaagttttgccttggttgaagatccaacgattaagtcaattggtatttcattagccagtggggttctatttgatgccttcttggttcgtctgattattattccagcgacaatcaagatattcggtcgtgctaactgggtattcccaggagcaaattactataataagtttaaggatgatgcgcaataaataggtattgtggcattaaaaatattttttttgggaggaagattctatggagtatctatgtaaaagaaaacactgtaacagcagctcagcttgaaagcgggtatggtgaaactcgattcagatattataagaatcgggcatgcctgcaatttgcagatgcattcatgattgaagacttgcacgagttcaagaaataaaaagtgcggtttttgtgcggattgtctgtggttattagccggatttccgtgataaattagtattatggattattagtaaagcgcgcttaaactgtggccagtaatcaccggcggaaaacggtggtcgcgctgttgccaaaaatacgatctgttatacccggcaattagcgttaatcaaactttgttaggttaatcgacttcaattctaattgctggaagcgtggggttagcacgttgttgccgtggatgatcgcggacctaaccattcctagtagcttaaatagagcagcgcggaagtgcacctgcggtcacgattcgggttcgagtcccggctaggatattatcgcagtggcggaataggtaaagcgtctttacgccttaaaacggcaattgtgtggtgcaaatccacacctgcgatattgccagtaatggcacatacttcacctccaatagtcctagcctttatggctggggttttgtattatagatttattggagggtgaaaattatggatagagaaagtttgttagaaatgatcaataatccagaatcaattttaaaggctgataaaaaaacgcttaagcaaagaatagagcaacagaggttaacagctgatgagtatgcagaggctgcaatcgatacaggaaaatctaaaggtcgagaattggttgttgatatattaaatgggtctttagggagtcttatttttgatgtgattgaaactggcgatgaactaggccaaaacatatctgatatgaaaaaatctttggtcgttgcttcttatgtacaaaaatcagacgaccacgataaagcgttacaatgtattgttgacttaattacggatccctatggtctgacattatattcaaaattaatagaaatacttaatgattcaccggcagatgatgataccttaaatgttttagccaacgttctaaggaatataagtaatgatagtgatttaaaagaacacttttcaaataagagagttgtgttgtctatgattgccaaactatcaccacaggcactcttagtattgcagaaagctaatagatggccgattatgaaagctcccaataaagcaagcatcactgttggaggaataatgaacggtgataacagtgagtatattgcacaaggattattaaaaactgaaatatttaatgacatttcaataacatcattaggactagcaatcaaggagttagaagtaaatggactatgtttcacggcgtctggcacgtttggcggtaaaaatgcagtacaagaaactttaacagattcgggcaaagaggtatataaattaatctattaatattatcaaggcagcctaggctgtcttttttaatcccgaatatttgtagtactgtaagattgagtctacaattaaagtaagaaagaagggatatcatggtagtttatgtatttgggcttcctagtcccaaagatgtttataagcgcgcaaaggataaaattcggaaacagaagaaagataaagagaagaaagcagaagaaggaccagttgcaacaactgcttaaggtaatgaaggatgtcaatacgacgtgtaattgatgtgatgatgcatcacgaaaatcaataaagagatatttgaaaacttttttaataaagtgaaatgcaattacaatcattagggaagtagcgacataaacatgaagttgtggtatattctggttaacggaaggtgatataatgtcaaagactattaatgagcaagttttcgaaataattgatgaaatgtataatgatttggcccacaaagaaattgatcagcatattaaggatattcttttaattgcagcaaaacatttatctacagaagatatgccagctcaagtggtagcagctaaaaccgtaaatggaattacaatttggaccatgaatggtaagaacttattgggtaatgaaaacgctgaacgaatccgaaaattgatgcggattgctcgctccgagggatacaaatggaatgcgactggcttaggttcattaggcgtacaattttaaaagagtttatcttgagacagcttaggctgtctttttttgtacataactgtacataaaaaataaatttttttcattctaaactacctataattttaatttgtataacaccatgatacaccataaacttaaatgcaatgctttcatcaacataggtgtataagtatcaaggtcttctatgtactttgtggcgctttaaagtgccattatctgaaaaataggtattaccaaaatctttcaaaatggcccctgttttctccataatttttgaatcaatcattttctcgtcctcgtttgctaaatggccaccattttttagatttattttggtcctgagtggcgctctcttctaaatcattatgatcattaacttcttcttttacaaaaggttttgattgtgtagtcaatgatttcaggtctttgatttcagatttgtattcttctaacaattttttatcttgcagcgctagtctctgttgttggtctaacaagttttgcatttgagatatttgcaaatctctattttctaattgtcgttctttgactgctagttgttcgtctctatttttttaacttcttcgatttcatttaataaatattggttgatatcccatgatttttgtttgtctgtttgtctcttatttgtctgtttttttgatagttttttgtttgtttgtttgtctaccttagaccttataaatcgctgttcttcgatagacaaaacaacaattcctctatcatttttttgtctacttttatttgtcagtgatttaatatgatattgaatggcttgtttagacacatctaactcttcagcaagttctcggattgtttttaaattttcactcatgatctatatcctgccttttaacgattggtagatactgtccaatcgattttttaagatacttagcaatattctttttagaatagtcatcttgtttatctcgaatatatgctaagtgttctttcacgccctttaaaccacgtaactcttttaatttgtcataaagtggataaacatttttctgtaaccctgacaaaatagccgtatccgtcaaatcaatatatgacaacaagaaatgttccatcagcaattttgtatatggacttttcatagcttcatatacgaggtctttttcactttcttcttgccttatcttaccgtcaatataagttggatcatctaacttgtaactaatatcatctgccacctgctttttagtgatatgaaagacgatactatcaatgctgcgtccttttttaactttttcatatataacattaaagctggtatgatttgtgatttctgctagaggttctttcaatactctcgtttcaaagtgagtgaatcgtttgtattctgttatcgtatcagtcatttctcgtaactctttcataccaatttcaggattacggtacctgtcaatttgttcttctcggcgtccacctttaacactatagtgctcgtattggttgtaattcatcgataaccaacgatacaaaataacggcatatttactattcaattcggaaatttctgacaaggcatgttgtgtaaaattggttttgagattaattaaatagggcataatttcaggactaaatcgaattaatacctcatcatgataatctgtccattctacatatggaattggcacaatgctaacaaacttaaaacctttatcttgttcttttttaatctgaaaaaaagcctgtttttgcattttttcaattgcctctttaaaacgactatgcttatcgttgtcatccactttaaagaaagcaaacatttctttctttgataaataaaccgtctgatcctgaggtggattgtcggtatcaattaaaaacaccgctagttcaaacattttgagtggtgtcttatccatcttggcaatggatgtgattaaactattatgttcaacgacttttctttttgataattcattcaaggtctgtacctgccttgtctttgattctggtataatagtcatataaatacactcctttgggtgtgttgttggataagcataaagaaaaacttttagacgggaatttctttatgcttttattataacattatatagccacttattttatttttttgtggctatatacacagttttttgtggttatatacacagttttttgtggctatataatacgtgaatgcattgttattactgtatttataactacgcaaaaaaaaactcctcgtaagatatatttataagccgttggcttacaataaaatttaattattactttgatactgcgggattcttcagaatataataggaccatggaatggatctatcgggaatttgctaaaaactcctgtagttaactctactttagtaagtccgttacccgagtctttacgctctctcccaactcactagctgttttcaatcaggcttatcttcaatgtagtagtttgaaggcggcataagtccaattggttaaaattctgttacgcgaggttgtagctgtgtaaagattttctggggaatcccgcagtatcaaagcaagttccaaataactctcgaaaggaggtccttcctgtgaaattatttgttggtttagatattagttctgaaaagattgatgcttgttttatgaccgatgatagtaacttatcaatcctaaatcgtttaagtgttgctaacgatttaaatggtgcttctgaaattaaagccttaattttaaaacatcacgcagaagtatcatttgaacagattgtgattggtatggaatcaacatcactatatagttttcatccagctatgtttttccaagaagatgcagacttaaatgcactaccaacggtagtcactgttgaaaacccatttaaaatcaagcaatattctcgtgtcttcgatgaagacaaaactgataccaatgatgccatgcgaattgctgactacttacgaattcaacgttttacaacgtcacctatcaaagaagaaaaatatatggcacttcaacgtttaacccgtactagatatcaactagttaccgaattagtaacggttaaacaacatttcttagaaaacttaacttataaatgtaatacgcttagtaaggaattaaaatcagaatctaccggcatttttagcgccacaattgtacatttaatgactgaaaactactcattagatgaattagccaatttaccactagaggacttcgtccaattgattcaaaatgttggccgcagtaactttaaaaatcctgaaaaactggttaaaaccattcagcgtgccattaaaaatagctatcagttgccgcgattaatgaatgagtcgattgatattattctcagtaccttggtagttcaaatgcgttcattacagcaaagtattaaacaaattgataaaggtatcgaaaaactagttgaaataattcctgaatatcaatgcttaaccagtgtgccaggaatcggtaaggtttatgccgcaggtatcttagctgaagtcggtcaaatcgaacgatttgatgatcaagcaaaagtcgccaaatatgccggtctatcctggaaagttaaacaatctggaaattatcagtcagaagtcacaccactaacaaaacaaggtaatcattatttacgttattacttagttgaagccgccaactcggtaaaaaatcacttacctgaatacacagctttttataaaaagaaatataccgaaaccccgataaataagcaccgccgagctattgttttaaccgccagaaaatttgtgcgtttggttgatgcgctactacgcaatcaccaactttacacaccaccaaagagtgtgttgaaggaataacgtagttattcacgcaaatctttggaatacctactaaaatttttatgaattttaagtaggcttagtttagtgttgccaattttgtaaaattacacgatatttatatcaattatcttcttgacttattaccactagactttttaaacaaaacaagagctacaaacttttaatcgagagtttgatcctggctcaggacgaacgctggcggcgtgcctaatacatgcaagtcgaacgcactctcgttagattgaagaagcttgcttctgattgataacatttgagtgagtggcggacgggtgagtaacacgtgggtaacctgccctaaagtgggggataacatttggaaacagatgctaataccgcataaaacctagcaccgcatggtgcaaggttgaaagatggtttcggctatcactttaggatggacccgcggtgcattagttagttggtgaggtaaaggctcaccaagaccgtgatgcatagccgacctgagagggtaatcggccacactgggactgagacacggcccagactcctacgggaggcagcagtagggaatcttccacaatggacgaaagtctgatggagcaacgccgcgtgagtgaagaaggttttcggatcgtaaaactctgttgttggagaagaacgtatttgatagtaactgatcaggtagtgacggtatccaaccagaaagccacggctaactacgtgccagcagccgcggtaatacgtaggtggcaagcgttgtccggatttattgggcgtaaagcgagcgcaggcggtttcttaagtctgatgtgaaagccttcggctcaaccgaagaagtgcatcggaaactgggaaacttgagtgcagaagaggacagtggaactccatgtgtagcggtgaaatgcgtagatatatggaagaacaccagtggcgaaggcggctgtctggtctgtaactgacgctgaggctcgaaagcatgggtagcaaacaggattagataccctggtagtccatgccgtaaacgatgagtgctaggtgttggagggtttccgcccttcagtgccgcagctaacgcattaagcactccgcctggggagtacgaccgcaaggttgaaactcaaaggaattgacgggggcccgcacaagcggtggagcatgtggtttaattcgaagcaacgcgaagaaccttaccaggtcttgacatcctttgaccactctagagatagagctttcccttcggggacaaagtgacaggtggtgcatggttgtcgtcagctcgtgtcgtgagatgttgggttaagtcccgcaacgagcgcaacccttattactagttgccagcatttagttgggcactctagtgagactgccggtgacaaaccggaggaaggtggggacgacgtcaaatcatcatgccccttatgacctgggctacacacgtgctacaatggatggtacaacgagtcgcgagaccgcgaggtttagctaatctcttaaaaccattctcagttcggattgtaggctgcaactcgcctacatgaagccggaatcgctagtaatcgcggatcagcatgccgcggtgaatacgttcccgggccttgtacacaccgcccgtcacaccatgagagtttgtaacacccaaagccggtgaggtaaccttcgggagccagccgtctaaggtgggacagatgattagggtgaagtcgtaacaaggtagccgtaggagaacctgcggctggatcacctcctttctaaggaataatacggaaaaccttgtacatttgcgaagtcgaaactttgtttagttttgagaggtctactctccctgaattattcatacttttcgttgcagttaaaactttgtgcaaagttactttagtgtgtaaaaaaagcagctttttgttagttttgttgtcggactgtttaaaaaaggacagacttcaccctttccctaagaaaaacattttttattttgtgagttcacagcggatatatttttagattttgaatcttgaacagtgtctgccaaaataatttatcgaacacattggtctgagataaatggacccagacttgacgcgcatggtgcgtgaccttagctgccacatggagtaatttaaaacggatcgtcccgacctgagcgtgtttaagctttgttggtaaaactaagttcttcatggcttgcagtatattataagcgaccccagctaccagcatccggaactcattggcctcaaaactagaactgtccgttttatcaaagtgaaagccacgtttaacttctttgatcaagtcttccatggaaccgcgttggtgatagagggcaaagacttgtggaccgcttaattcttccaagttggtcacgataaactcatggtcaaacagaaagttgcccgccggccgcgttgatttaataatcacacgataaggtcgtgaccaactttgaggacaatagtctcgcaggacatgccattggacttcagcttcggtgaagtcctggtcacccacttggatcaggttttcagcccgactttggagctggtagttcgcttttaaacgaatcacgaacttagcctgctttttatcacacgcatggtagatccctggagctgcgaaaccagaatctccccgcactaagacatccagggaagatccgtcataggcccgtaagctccgtaataaaaatttagtcgcaccttgggaagtatagcgattgccggggcgtaattgagcattcaacaagcagcccgataaagcatcaaaggctagtaaaggatgataaccgttggtctggtagtgaccgttataagcactcttttcttggtcaccaaacgtatcggcatgtgtcgaatctagatcaaggatcagctgatgttgatttagctgcccaagaacaaagtgagctaccgagccgagcaatgatttgactgaaaagagcccagacgctgaaatgtgattgataaagcgtgaaagtgtcggctgggaagcgaccgcttgagacaagaccagcttaaaatcaacggcgtgtgacaaggtattagccgactgatcttggcagtatcctgccagcaattgcaacagcaactgcttaaataaattgttcaagggaaaggtacaatatttacggtcatctttaaaatgcaagttatcttctaagagctggtcaaagtgaatttggtgcagaaattcagcaattaataaagttccggcatcgttcgctaactcaccaccgtcattagaaatgttgatctggtcattgaataaaagtttttcatgatgtaaagttgacataaggagcactcctgttctttgtggttttcatcgattttacaatagcacaggatgtgctctttttgtacacccaacaggtgaaaaacgaaaaagatgcgaactagcatgacaacaacaaaaagtagtccttaagggaaaagtatgaataattcaggatgtttaattctggtgtcttgaatgaaataccgccgtcagcttctgcatcatagtagccatcacatttatacaagaagttaacgttatccgtcaaagtgacaaagccatgggcgaagccctttggaacaagtaattgacggtgattgctggcagaaaggatgtacccttcccattgtttgtaagttggtgaacctgcacgaacgtcaacgatgacatctaagacagccccagtcaccacgcgaattaatttcgtttgcgcagctttaccgcgttggaaatgtaagcctcgtaaaacgcctgcttgcgttgaaagtgagtgattatcttgaatgaaatcaatatcaatgcccgcttctttgaaatcgcgatctgaataagattctgtaaagaatccacgatgatcaccaaagacggctggttcaataattttaacgtcttgtaatttagttgttgtgacttttaacttacccatgattacttacccctaatcttcttttactaatcgcaataaatattgaccgtagtcgtttttcttgagtggttgtgccaattcaatcacttttgctttatcgatatagtgcatgcggtaagcaatttcttctagacacgccactttcaagttttgccgtttttgaacggtcgcaataaaactgctggcttcttgtaatgaatcatgggttccagtatctaaccaagcaaacccacggcccattaattcaacatctagctggcctttttcaagatacgctttgttgatgtctgtaatttctagttcgccacgtggtgaaggtttaatattcttcgcaatgtcgacaacttggttgtcgtagaagtataacccagtcaccgcatagttacttgccggatgttctggcttttcaacgattgatttagcatgcatattttcatcaaaatcaacaacgccaaagcgttctggatcattcacatgataaccaaaaacggttgcgcctgattctttttgagccgctctttggagcatttctgaaaggccaccaccataatagatgttgtcacctaagattaagcatactgaatcatcgccgatgaagtccgccccaatcacgaaagcctctgccaaaccattgggttgttcttgaacggcgtattcgatgtttaaccctaagtcattgccgttgccaaataattctttaaaccgtggtgtatcagttggggttgagataatcataatatcttgaatcccggccaacatgagcactgacattggatagtaaatcattggtttgtcatagattggaatcaattgttttgataaagcgcgtgtgatgggatacaaacgtgtcccagaaccgcctgctagaataatacctttcatggcagattgcaagaaataacttgaacgaatttaatgacgtaaattaagcaagaagatctcgattggtgtatgccaattaagacatttaagtggccgtgaattcaaataccaattaatttgaaccaattggtgatcacttagttcttcaatggcttggcctttgggaataaagcgccgcaaaactcggttacggttctcattactgcctctttcatgcggtgaataggcatgggcaaaataaacctgtgtaccagttcgccgttcaattgtctgatagttagcgaactctttaccatgatctacggtaagcgtcttgagcttgtcttgaagttgactagctagttcaagtacggcttgagtcatggactgactgtcgcgaccatggagccgtttaacaattgtcaggcgactcttacgctccacaaaagtagccacagcttgacctttacgtttaccagaaagtacggtatcagcttcaaagtggccgaattcctggcgagtttcgactttatgaggccgctcctcaatggagcggccgtgattgaacgtaccacgcttttctttagcacgatgacgacgaattccatgatcaggcaaatcgggcaactgtatatcaagccatccttgatcaatccagttatagaccgtcttgtaggcaatccccaccacatgggcaacttgttcaggggaccacttctggacttgaatcttttcctcgatcaagtgtttaaggtttttagtgagcgaagacttccgcccccgttgactaacctttcgttcaaagtcagtttgcgctagcccagcctggtactcactatttagccggtgaagttcgttaaagatggtggtcttactaaagcctaagtagttagcgatgtatcgcaaggaacgtccttcattatgaagcgtttcaatgacaacacggttctggaatgataaaatagtggtgctcatcaaggtccttctttctaatggattgtgtggtaacaccattaaagaccttgatgggtttttctgtccacttaaatgttcaacttaaattttacaatctgccaaataataaagccaaaacgtgctcccaaagtcagtttgcgtcgcttaataggtaattggtaaccatgttcatgcataaccaacgattccttgttaatgctcacgaactagccgactttgggggtgcgtttttattttaaaggtggaaggcggcttgtacacccacgatcagcattttgacgccgatggttgctaaaatcagccccattaacttggtgatcacgttcatgatgttgttgcccagcttgtccatgatttgttcaccgtagataaaaatgaagtaagcaatgactgctaaaacaacgaacgcggccacgacgatgaaggggttagttccactagccaagttcatggtggtggcaatggttccggggccggccaaaattggcatggctagcggagaaatcgcgacgttggtgttactactgttgacggaatccttaacggatttttcgggatcgtgctggatcggcgaaacgttaccttggatcatgtggtaaccaatcaaccccaaaatgattccgcccatgatgcggagtgcagcaaggttgataccaaaaatggtgaagatgtaatttccgagaaaggcaaacagtaccacgatgacggtcgccacgataaaagccagtcgggcaatcgcgttgatttccttgcgactgttatcagcagtcaaactgacgaacattggcaagttagcaaaggggttcataattgcaaaaaatgcggtgaatgaaagtaaaaatgcttgaactaaatgcatggtcgtcctccttgttaaacgttttcaatgcaatgattgttttttaattatatgggttaggtggggaaatgccaagtttggtgatttatgtaccgttattgaaaaattagacaataagtcatattaatattgttcttctaaagagacgattggccaattgattttgaccaagcaattacgtctaaaaaagatgctaaccaaccaacctttactgaatttgaaaaagataatccgtttgtttacggtgaaatttaaggagatcgacacactatgaaaaatattattgttaccggtggggccggctttatcggttctaacttcgtgcattatgtggtgaataaccacccagaagttcacgtgacggttttagataaattaacttacgctgggaaccgtgcgaacttggccggtttaccagcagaccgtgtggaattagttgttggcgatatctgtgacgctgaattagtggatcgcttagtccaaaagacagacgcagtggtacactatgctgccgaaagtcacaacgataattctttgaaagatccttcaccctttattcaaacgaacatcatcggttcatatacgttgatcgaagcttgtcgcaagtataatgtgcgttatcaccacgtttcaaccgatgaagtatacggtgatttaccattgcgtgaagacttaccagggcacggcgaaggcgttggtgaaaaattcactcctgaaacgcgttataacccaagtagtccttattcatcatcaaaggcgagctcagacttgttagtccgggcatgggtgcgttcattcggcctacaagcaaccatttcaaactgttcaaataactacggtccttatcaacacattgaaaaattcattccccgtcaaattaccaatattttaagtgggattcgaccaaaactttacggttcaggtcaaaatgtgcgtgattggattcatacgaatgatcactcaagcgccgtatgggcaatcctaaccaaaggcaaaatcggtgaaacttatttaatcggtgccgacggcgaacaaaacaattgattggccaattgattttgaccaagcaattacgtctgaaaaagatgccaaccaaccaacctttactgaatttgaaaaagataatccgtttgtttacggtgaaatttaaggagatcgacacactatgaaaaatattattgttactggtggggccggctttatcggttctaacttcgtgcattatgtggtgaataaccacccagaagttcacgtgacggttttagataaattaacttacgctggcaatcgcgctaacttagccggtttaccagcagaccgtgtggaattagttgttggcgatatctgtgacgctgaattagtcgataagttagttcaaaagacagacgcagttgtacactatgctgccgaaagtcacaacgataactctctaaaggatccttcaccttttattcaaacgaacattatcggctcatatacgttgattgaagcatgtcgcaagtataatgtgcgttatcaccacgtttcaaccgatgaagtatacggtgatttaccattgcgtgaagacttaccaggacacggcgaaggcgttggtgaaaaattcacgcctgaaacgcgttataacccaagtagcccttattcatcatcaaaggcgagctcagacttgttagtccgagcttgggtccgttcatttggcttacaagcaactatttcaaactgttcaaacaactatggtccttaccaacacattgaaaaattcattccacgtcaaattaccaatattttaagtgggattcgaccaaaactttacggttcaggtcaaaatgtgcgtgattggattcatacgaatgatcattcaagtgccgtttgggcaattttaaccaaaggcaaaatcggtgaaacttatttaatcggtgccgatggcgaacaaaataacggatgatttaaatgccaattccaggcagtttcaataattgcttccatattgtcatactgtggcgtccaacctaagacttcgcgtgctttgtcacttgcggcaatcaaagtacttggatcaccagcacgacgcggtgccattgtcacaggaattgccttgccagtcactttgcgagcggcttcgacaatttccatatttgaaaaaccagttgatgagcctaagttaaaggcgttactatcatggccttcttcgaggtaaccgagggccaaaatatgggcgtcggctaagtctaacgcgtggacatagtcgcggacgttagtgccatctggtgtatcataatcatcaccaaagatggagagttgttcacgtttgccagcagccacttgtaacacgattggtaacaagtgggtttctgggtgatgatcttcaccgattgaaccatctggtttggcaccagcgacattgaagtaccgtaatgcaacgaatttaataccgtaagctctgtcagcccatttcatcatcgtttccatcattaatttactttcaccatacgggttagttgggacttgtgggtcggattccttaattggaattgatttcggttccccataagtggccgctgttgatgaaaagacgatgtgtttgacgtcgaattcattcatcacttcgagtaaggcagtcatgccgtatgtgttattgtcgaaatatttaagtggtgcttgcatcgattcgggcacgattgagaaagcggcgaaatgaatcacaccgctgactttttcttgttggaagacgctgcgcatgaaatctttgtcgcgaatatcgccttgatgaattgtcttaaaatcttggaaattaacgtattcacgtttcaaaattgaatgaaaactttcaattcgcgcgttatcgccgggctgaccctttcgggagtaagaatgcttgataccatacttcgataaagtgttttcaaataagtcacttgtgtattggcttcccatatcactatgaataatttgtggtttaactgcttgcgccatgacttgggtaataacgttagtcgctagttctttagtcatctgcgtattaagttggtaagcaataacccgtcgggttactggattatagacactagctaggtaacaccaagtatggttaaggggaatgtacgtaatatcagtcaataaaataccagattgatcagttaactgcttaatcaagtttggtcgctgatcataatcagtctgagtggttggcttattgattcgtttaaccattctagatctaatccctaattcacacatttgttgatagaccagacgctgactaacgtgaatatcagactgttgatttagtaagatcgttaatcgtgggtagccatacattggatatcttaaccaagccgttaacacttcttgtttaattaaatgccggcggcgttcagttctacttggctgccaatgtagataatcatagtaggttgagcgcggaattttgagtactgataagatacgcgtaatgcggtgcccagcaagtaaattagcgttgacgacttctaacacgagggcacgccctttaataattagctttttgccatgagcaccgctcgggaaaacaggattcgaacctgcgaccccctggtcccaaaccaggtgctctaccaagctgagctatttcccgttatatgcacccagtaggagtcgaacctacaaccttctgattcgtagtcagacactctatccagttgcgctatgggtgcatttttcattatgatgccgaggaccggaatcgaaccggtacggtagtcacctaccgcgggattttaagtcccgtgcgtctgccagttccgccaccccggcttaatcataatgaaagcggaagacgggattcgaacccgcgacccccaccatggcaaggtgatgttctaccactgaactacttccgcatcttaatgccgactagacgattcgaacgcccgaccctctgattacaaatcagatgctctaccaactgagctaagtcggcataataagataactttcattgaatattcaattgaatgcgggtgaagggacttgaacccccacgtctatatagacactagaacctaaatctagcgcgtctgccaattccgccacacccgcattttggcgtgtaacttggccgatgagtcgtgacaggctcgaactgtcgaccctctgattaaaagtcagatgctctaccaactgagctaacgactcaatggaggttacagggctcgaacctgtgaccctctgcttgtaaggcagacgctctcccaactgagctaaacctccatcaataaaaaattaactattagtattcaaaagaaccatggtattaacgcaacaaaaaaagccctatctctaaggctttttaaaactgtataatgttcaattataccggtgatcggggtcgaaccgatacttccgtgaggaaacgggattttgaatcccgcgcgtctgccaattccgccacaccggcattttgaccaattaaggttagcgcctaaacgcaaaggcggtaaccggatttgaaccggtgataaaggttttgcagacctctgccttaccacttggctataccgccataaaagaacaaatcctgtcccttaaaaagtaaattgggctagctggattcgaaccagcgcatgacaggatcaaaacctgttgccttaccgcttggccatagcccaagaataaaggcggtatgtgggaatcgaacccacgtatgtcggatccacaaaccgatgtgttaaccacttcaccaataccgccatcattaacatgaataattatactacattcacacataatatgcaagctataatataaacagggatagtaggaattgaacccacactgacggttttggagaccgtagttctacctttaaactatatccctaaaaaatatggaggagagtggattcgaaccaccgaacccgaaggagcggatttacagtccgccgcgtttagccacttcgctactcctccaaaactacgtaatcgccaatatcagcgaatgcttgtttagcgtactctttagcgatatcatcagctgtaacgaataggtcgttagcaatctcgttacgcagcttatcaatttgctcacgcacactagcatttactagcaaccttgggccatttacattagcggtcttgtaatcaacgtcataagcttgcatataagcccatgtggcattgaatcgttgcagatagtacaagcagaacattttctgttgatcgtttaacccatcattagcagataattccttcactattttgggtgcaaccttttcaactttgtgtgcaccctttttgcttttggggtgcaccgcttttttatttggcccacgttcccatccattacgctgtttccatgatttcacggtattaatcgacacatcatatttatcagcgatgtctttgtacttcatcccagataaatagtcttcctttgcatcatttcttgattcatcatgcattacatagcaccgccctccttcttataattgtttttctccaataaaatacgccgctcattatctgaacgacgtttctcatctatcttcttctgtttaagccacttctctaaacgggcatctgctgccgtccattcaggtgtttcgtagccgtactttgaatgtattagtttcacaatgcctatcactcctttaattttagttctatcatcagctttaattctagtgccattaacattgattattgcagttatcacgccaggcaattctgttttaccatttggtgatttagcaactttaccatatatgattgctgtaatggcagctgttttccgcggtgatatttttagaacaattattgggggcattgttaatattgttgcaagtctttatatcgcttcatgggtagcaccgttagtaacgcagtcagccaaagccgcacatttcgcaatgcaagggaattcatcaatttcagtgctcagcgatggtggtgtttggacaacttgggttattgtgggactgggtaagataatgagttggggaggtatcgggataattggaatagttactttagcaattatggtctggtacaacaaatttagaagtaaaaagctagttaaagttaattaaaaaataaggagtgaaacgcaatgaaaaaattaatgattgtttgtggtagtggtattgcaacatcaacaatagcagagggtaagattaaggaatatttagaaaaagaaggtgtacttagtcaagtacaaacatataaagggaacatagcagaatatattaatcaaattgataattatgatggatttgttagcacaactattgtacctattgcgggagtagggtttgaacctacgaccttcgggttatgagcccgacgagctaccagactgctccatcccgcgataatataaaggagaatgagagattcgaactctcgcgtgggcagaacccacctgacggttttcaagaccgttcccttcagccagacttgggtaattctccataaaacatataaaatgtaacattgttacaatgacccgtacgggatttgaacccatgataccgccgtgaaagggcggtgtcttaaccacttgaccaacgggccatacaaaacggagaaggagggatttgaaccctcgcgccagtttcccgacctacacccttagcaggggcgcctcttcagccacttgagtacttctccatattatttagataatgggcctaaatggactcgaaccatcgacctcacgcttatcaggcgtgcgctctaaccagctgagctataggcccatgaaaagcgggtgacgagaatcggactcgcgacaacagcttggaaggctgtggttttaccactaaactacacccgcatattcatgatctaaattaagtaatttaaattgaaagtcaaatttgttcgtacttttatgtccggattcttgacataggagcctcttgtcgaatcaatgtttcactcacataaaacttatggtataaattttctatacttttcgtgaatggtgcattgaatagacaacttaatataattacatttcgtctctcaactggcgagaatgcgacataatctttttcgtgagtttgcttcattatttgtaaataattctggtaatttaacaaatagcctcttccatgctccgattctactaaagtcattttataagtctcatttatcgatttaaccgacctgtaaatcgttttttgagatacggcaactacatcggccaattcatttgctgtcatgtaatctccattctttaacaaagcattcaatatctgattcatataaccagtcatattttcctccttatgtttatgatagcgctatttttattaaaaaaagataaacctttgcccgttgctacggtcattcttcttgtttttctttattctagtacatcttgtgtaataattttacaatctaccataagcctaccgattttttaatattattttattcatcaatttccggcgccgacccaagctctgcctgaatcatccagattttcttctcaattgcggttttgagaccaatgaaaatatcttgggtactgaagtctttttcaacatcggatacttcaatgccgtgttggtaaaggtcttccaagtaacgatagccatcaactaagtgtgcgaggcgttctggggttattttgtcccattcaccaggccagtcttgaatcttagtgttttcggccatttcttttaaggtcgagtaaggactgccatcaagcgcaatcagccgttcagaaatgacatcgagttggctgtcaatttcttccatgaactcatccatcaaggggtgcaacttcaaaaagttgggtccacgcatgtaccaatgcgtctgatggataatcattgacatctggctcaaatcggcaacgagttgatttaatactgctttggttttcgtatatttcattagattgatctcctttcgatatggttattacgtttgttaaatgcagttgatagtaattgcagttctcgcattaagacaagtacttttttatgatttactaagatattcatacgatgtaattcaccagttacacgacgataaccgtacgctggatgattcttcttgattatttggatggtttgtttaacagattggtcagatgaaccgttcggttcatgactaataatgtattcatacgtacttttggccataccaactatttttagaatttttactagtttgtgtttaagccttagctcttggatgacttgcgcttgttgttttcttcttcctggactaaggctcttaatttttttaggtattcattctcgatttgtagcaattcattttcttctctaagacgttctaactctgtttgttgccgtttttttgattgtttatcagctgacataattgtttgccgtcctttggaacgatataaggcatcagcaccctcagtctcccaaatatgttgccattgccagatggtcccgac
